(19) United States
(12) Patent Application Publication
(10) Pub. No.: US 2024/0424130 A1
(43) Pub. Date: Dec. 26, 2024

(54) COMPOSITIONS AND METHODS FOR MODULATING DELTA GAMMA CHAIN MEDIATED IMMUNITY

(71) Applicant: JANSSEN BIOTECH, INC., HORSHAM, PA (US)

(72) Inventors: RAJKUMAR GANESAN, BLUE BELL, PA (US); IQBAL S. GREWAL, NEWTOWN, PA (US); SANJAYA SINGH, BLUE BELL, PA (US); MICHAEL RIIS HANSEN, BROOMALL, PA (US)

(73) Assignee: JANSSEN BIOTECH, INC., HORSHAM, PA (US)

(21) Appl. No.: 18/812,337

(22) Filed: Aug. 22, 2024

Related U.S. Application Data
(62) Division of application No. 17/512,195, filed on Oct. 27, 2021, now Pat. No. 12,076,413.
(60) Provisional application No. 63/106,703, filed on Oct. 28, 2020.

(51) Int. Cl. A61K 47/68; A61K 39/00; C07K 16/28

(52) U.S. Cl. CPC A61K 47/6897; C07K 16/2809; A61K 39/00; C07K 2317/24; C07K 2317/31; C07K 2317/35; C07K 2317/56; C07K 2317/565; C07K 2317/73

(57) ABSTRACT

Provided herein, in certain aspects, are antibodies that bind to T cell receptor (TCR) Vγ9 (TRGV9), TCR Vδ2 (TRDV2), or the TCR gamma/delta constant region (TRGDC), as well as recombinant cells containing the vectors, and compositions comprising the antibodies. Methods of making and using the antibodies are also provided.

### CROSS-REFERENCE TO RELATED APPLICATIONS

[0001] This application is a divisional application of and claims the benefit of U.S. Ser. No. 17/512,195, filed Oct. 27, 2021, which claims the benefit of U.S. Ser. No. 63/106,703 filed Oct. 28, 2020; the disclosures of which are incorporated by reference herein in their entirety.

### FIELD

[0002] Provided herein, in certain aspects, are antibodies that bind to T cell receptor (TCR) Vγ9 (TRGV9), TCR Vδ2 (TRDV2), or the TCR gamma/delta constant region (TRGDC), as well as recombinant cells containing the vectors, and compositions comprising the antibodies. Methods of making and using the antibodies are also provided.

### REFERENCE TO SEQUENCE LISTING SUBMITTED ELECTRONICALLY

[0003] This application contains a sequence listing, which is submitted electronically as a XML formatted sequence listing with a file name of “JBI6395USDIV1_SL.xml” and a creation date of Aug. 21, 2024 and having a size of 5,799,673 bytes. The sequence listing submitted is part of the specification and is herein incorporated by reference in its entirety.

### SUMMARY

[0004] In one aspect, provided herein is an antibody that binds TRGV9. In one embodiment, the TRGV9 antibody comprises: (i) a VH comprising a VH CDR1, a VH CDR2, and a VH CDR3 having an amino acid sequence of a VH CDR1, a VH CDR2, and a VH CDR3, respectively, of a VH having an amino acid sequence of SEQ ID NO:31; and (ii) a VL comprising a VL CDR1, a VL CDR2, and a VL CDR3 having an amino acid sequence of a VL CDR1, a VL CDR2, and a VL CDR3, respectively, of a VL having an amino acid sequence of SEQ ID NO:32. In one embodiment, the TRGV9 antibody comprises: (i) a VH comprising a VH CDR1, a VH CDR2, and a VH CDR3 having an amino acid sequence of a VH CDR1, a VH CDR2, and a VH CDR3, respectively, of a VH having an amino acid sequence of SEQ ID NO:65; and (ii) a VL comprising a VL CDR1, a VL CDR2, and a VL CDR3 having an amino acid sequence of a VL CDR1, a VL CDR2, and a VL CDR3, respectively, of a VL having an amino acid sequence of SEQ ID NO:66. In one embodiment, the TRGV9 antibody comprises: (i) a VH comprising a VH CDR1, a VH CDR2, and a VH CDR3 having an amino acid sequence of a VH CDR1, a VH CDR2, and a VH CDR3, respectively, of a VH having an amino acid sequence of SEQ ID NO:99; and (ii) a VL comprising a VL CDR1, a VL CDR2, and a VL CDR3 having an amino acid sequence of a VL CDR1, a VL CDR2, and a VL CDR3, respectively, of a VL having an amino acid sequence of SEQ ID NO:100. In one embodiment, the TRGV9 antibody comprises: (i) a VH comprising a VH CDR1, a VH CDR2, and a VH CDR3 having an amino acid sequence of a VH CDR1, a VH CDR2, and a VH CDR3, respectively, of a VH having an amino acid sequence of SEQ ID NO:133; and (ii) a VL comprising a VL CDR1, a VL CDR2, and a VL CDR3 having an amino acid sequence of a VL CDR1, a VL CDR2, and a VL CDR3, respectively, of a VL having an amino acid sequence of SEQ ID NO:134. In one embodiment, the TRGV9 antibody comprises: (i) a VH comprising a VH CDR1, a VH CDR2, and a VH CDR3 having an amino acid sequence of a VH CDR1, a VH CDR2, and a VH CDR3, respectively, of a VH having an amino acid sequence of SEQ ID NO:167; and (ii) a VL comprising a VL CDR1, a VL CDR2, and a VL CDR3 having an amino acid sequence of a VL CDR1, a VL CDR2, and a VL CDR3, respectively, of a VL having an amino acid sequence of SEQ ID NO:168. In one embodiment, the TRGV9 antibody comprises: (i) a VH comprising a VH CDR1, a VH CDR2, and a VH CDR3 having an amino acid sequence of a VH CDR1, a VH CDR2, and a VH CDR3, respectively, of a VH having an amino acid sequence of SEQ ID NO:201; and (ii) a VL comprising a VL CDR1, a VL CDR2, and a VL CDR3 having an amino acid sequence of a VL CDR1, a VL CDR2, and a VL CDR3, respectively, of a VL having an amino acid sequence of SEQ ID NO:202. In one embodiment, the TRGV9 antibody comprises: (i) a VH comprising a VH CDR1, a VH CDR2, and a VH CDR3 having an amino acid sequence of a VH CDR1, a VH CDR2, and a VH CDR3, respectively, of a VH having an amino acid sequence of SEQ ID NO:235; and (ii) a VL comprising a VL CDR1, a VL CDR2, and a VL CDR3 having an amino acid sequence of a VL CDR1, a VL CDR2, and a VL CDR3, respectively, of a VL having an amino acid sequence of SEQ ID NO:236. In one embodiment, the TRGV9 antibody comprises: (i) a VH comprising a VH CDR1, a VH CDR2, and a VH CDR3 having an amino acid sequence of a VH CDR1, a VH CDR2, and a VH CDR3, respectively, of a VH having an amino acid sequence of SEQ ID NO:269; and (ii) a VL comprising a VL CDR1, a VL CDR2, and a VL CDR3 having an amino acid sequence of a VL CDR1, a VL CDR2, and a VL CDR3, respectively, of a VL having an amino acid sequence of SEQ ID NO:270. In one embodiment, the TRGV9 antibody comprises: (i) a VH comprising a VH CDR1, a VH CDR2, and a VH CDR3 having an amino acid sequence of a VH CDR1, a VH CDR2, and a VH CDR3, respectively, of a VH having an amino acid sequence of SEQ ID NO:303; and (ii) a VL comprising a VL CDR1, a VL CDR2, and a VL CDR3 having an amino acid sequence of a VL CDR1, a VL CDR2, and a VL CDR3, respectively, of a VL having an amino acid sequence of SEQ ID NO:304. In one embodiment, the TRGV9 antibody comprises: (i) a VH comprising a VH CDR1, a VH CDR2, and a VH CDR3 having an amino acid sequence of a VH CDR1, a VH CDR2, and a VH CDR3, respectively, of a VH having an amino acid sequence of SEQ ID NO:337; and (ii) a VL comprising a VL CDR1, a VL CDR2, and a VL CDR3 having an amino acid sequence of a VL CDR1, a VL CDR2, and a VL CDR3, respectively, of a VL having an amino acid sequence of SEQ ID NO:338. In one embodiment, the TRGV9 antibody comprises: (i) a VH comprising a VH CDR1, a VH CDR2, and a VH CDR3 having an amino acid sequence of a VH CDR1, a VH CDR2, and a VH CDR3, respectively, of a VH having an amino acid sequence of SEQ ID NO:371; and (ii) a VL comprising a VL CDR1, a VL CDR2, and a VL CDR3 having an amino acid sequence of a VL CDR1, a VL CDR2, and a VL CDR3, respectively, of a VL having an amino acid sequence of SEQ ID NO:372. In one embodiment, the TRGV9 antibody comprises: (i) a VH comprising a VH CDR1, a VH CDR2, and a VH CDR3 having an amino acid sequence of a VH CDR1, a VH CDR2, and a VH CDR3, respectively, of a VH having an amino acid sequence of SEQ ID NO:405; and (ii) a VL comprising a VL CDR1, a VL CDR2, and a VL CDR3 having an amino acid sequence of a VL CDR1, a VL CDR2, and a VL CDR3, respectively, of a VL having an amino acid sequence of SEQ ID NO:406. In one embodiment, the TRGV9 antibody comprises: (i) a VH comprising a VH CDR1, a VH CDR2, and a VH CDR3 having an amino acid sequence of a VH CDR1, a VH CDR2, and a VH CDR3, respectively, of a VH having an amino acid sequence of SEQ ID NO:439; and (ii) a VL comprising a VL CDR1, a VL CDR2, and a VL CDR3 having an amino acid sequence of a VL CDR1, a VL CDR2, and a VL CDR3, respectively, of a VL having an amino acid sequence of SEQ ID NO:440. In one embodiment, the TRGV9 antibody comprises: (i) a VH comprising a VH CDR1, a VH CDR2, and a VH CDR3 having an amino acid sequence of a VH CDR1, a VH CDR2, and a VH CDR3, respectively, of a VH having an amino acid sequence of SEQ ID NO:473; and (ii) a VL comprising a VL CDR1, a VL CDR2, and a VL CDR3 having an amino acid sequence of a VL CDR1, a VL CDR2, and a VL CDR3, respectively, of a VL having an amino acid sequence of SEQ ID NO:474. In one embodiment, the TRGV9 antibody comprises: (i) a VH comprising a VH CDR1, a VH CDR2, and a VH CDR3 having an amino acid sequence of a VH CDR1, a VH CDR2, and a VH CDR3, respectively, of a VH having an amino acid sequence of SEQ ID NO:507; and (ii) a VL comprising a VL CDR1, a VL CDR2, and a VL CDR3 having an amino acid sequence of a VL CDR1, a VL CDR2, and a VL CDR3, respectively, of a VL having an amino acid sequence of SEQ ID NO:508. In one embodiment, the TRGV9 antibody comprises: (i) a VH comprising a VH CDR1, a VH CDR2, and a VH CDR3 having an amino acid sequence of a VH CDR1, a VH CDR2, and a VH CDR3, respectively, of a VH having an amino acid sequence of SEQ ID NO:541; and (ii) a VL comprising a VL CDR1, a VL CDR2, and a VL CDR3 having an amino acid sequence of a VL CDR1, a VL CDR2, and a VL CDR3, respectively, of a VL having an amino acid sequence of SEQ ID NO:542. In one embodiment, the TRGV9 antibody comprises: (i) a VH comprising a VH CDR1, a VH CDR2, and a VH CDR3 having an amino acid sequence of a VH CDR1, a VH CDR2, and a VH CDR3, respectively, of a VH having an amino acid sequence of SEQ ID NO:575; and (ii) a VL comprising a VL CDR1, a VL CDR2, and a VL CDR3 having an amino acid sequence of a VL CDR1, a VL CDR2, and a VL CDR3, respectively, of a VL having an amino acid sequence of SEQ ID NO:576. In one embodiment, the TRGV9 antibody comprises: (i) a VH comprising a VH CDR1, a VH CDR2, and a VH CDR3 having an amino acid sequence of a VH CDR1, a VH CDR2, and a VH CDR3, respectively, of a VH having an amino acid sequence of SEQ ID NO:609; and (ii) a VL comprising a VL CDR1, a VL CDR2, and a VL CDR3 having an amino acid sequence of a VL CDR1, a VL CDR2, and a VL CDR3, respectively, of a VL having an amino acid sequence of SEQ ID NO:610. In one embodiment, the TRGV9 antibody comprises: (i) a VH comprising a VH CDR1, a VH CDR2, and a VH CDR3 having an amino acid sequence of a VH CDR1, a VH CDR2, and a VH CDR3, respectively, of a VH having an amino acid sequence of SEQ ID NO:643; and (ii) a VL comprising a VL CDR1, a VL CDR2, and a VL CDR3 having an amino acid sequence of a VL CDR1, a VL CDR2, and a VL CDR3, respectively, of a VL having an amino acid sequence of SEQ ID NO:644. In one embodiment, the TRGV9 antibody comprises: (i) a VH comprising a VH CDR1, a VH CDR2, and a VH CDR3 having an amino acid sequence of a VH CDR1, a VH CDR2, and a VH CDR3, respectively, of a VH having an amino acid sequence of SEQ ID NO:677; and (ii) a VL comprising a VL CDR1, a VL CDR2, and a VL CDR3 having an amino acid sequence of a VL CDR1, a VL CDR2, and a VL CDR3, respectively, of a VL having an amino acid sequence of SEQ ID NO:678. In one embodiment, the TRGV9 antibody comprises: (i) a VH comprising a VH CDR1, a VH CDR2, and a VH CDR3 having an amino acid sequence of a VH CDR1, a VH CDR2, and a VH CDR3, respectively, of a VH having an amino acid sequence of SEQ ID NO:711; and (ii) a VL comprising a VL CDR1, a VL CDR2, and a VL CDR3 having an amino acid sequence of a VL CDR1, a VL CDR2, and a VL CDR3, respectively, of a VL having an amino acid sequence of SEQ ID NO:712. In one embodiment, the TRGV9 antibody comprises: (i) a VH comprising a VH CDR1, a VH CDR2, and a VH CDR3 having an amino acid sequence of a VH CDR1, a VH CDR2, and a VH CDR3, respectively, of a VH having an amino acid sequence of SEQ ID NO:745; and (ii) a VL comprising a VL CDR1, a VL CDR2, and a VL CDR3 having an amino acid sequence of a VL CDR1, a VL CDR2, and a VL CDR3, respectively, of a VL having an amino acid sequence of SEQ ID NO:746. In one embodiment, the TRGV9 antibody comprises: (i) a VH comprising a VH CDR1, a VH CDR2, and a VH CDR3 having an amino acid sequence of a VH CDR1, a VH CDR2, and a VH CDR3, respectively, of a VH having an amino acid sequence of SEQ ID NO:779; and (ii) a VL comprising a VL CDR1, a VL CDR2, and a VL CDR3 having an amino acid sequence of a VL CDR1, a VL CDR2, and a VL CDR3, respectively, of a VL having an amino acid sequence of SEQ ID NO:780. In one embodiment, the TRGV9 antibody comprises: (i) a VH comprising a VH CDR1, a VH CDR2, and a VH CDR3 having an amino acid sequence of a VH CDR1, a VH CDR2, and a VH CDR3, respectively, of a VH having an amino acid sequence of SEQ ID NO:813; and (ii) a VL comprising a VL CDR1, a VL CDR2, and a VL CDR3 having an amino acid sequence of a VL CDR1, a VL CDR2, and a VL CDR3, respectively, of a VL having an amino acid sequence of SEQ ID NO:814. In one embodiment, the TRGV9 antibody comprises: (i) a VH comprising a VH CDR1, a VH CDR2, and a VH CDR3 having an amino acid sequence of a VH CDR1, a VH CDR2, and a VH CDR3, respectively, of a VH having an amino acid sequence of SEQ ID NO:847; and (ii) a VL comprising a VL CDR1, a VL CDR2, and a VL CDR3 having an amino acid sequence of a VL CDR1, a VL CDR2, and a VL CDR3, respectively, of a VL having an amino acid sequence of SEQ ID NO:848. In one embodiment, the TRGV9 antibody comprises: (i) a VH comprising a VH CDR1, a VH CDR2, and a VH CDR3 having an amino acid sequence of a VH CDR1, a VH CDR2, and a VH CDR3, respectively, of a VH having an amino acid sequence of SEQ ID NO:881; and (ii) a VL comprising a VL CDR1, a VL CDR2, and a VL CDR3 having an amino acid sequence of a VL CDR1, a VL CDR2, and a VL CDR3, respectively, of a VL having an amino acid sequence of SEQ ID NO:882. In one embodiment, the TRGV9 antibody comprises: (i) a VH comprising a VH CDR1, a VH CDR2, and a VH CDR3 having an amino acid sequence of a VH CDR1, a VH CDR2, and a VH CDR3, respectively, of a VH having an amino acid sequence of SEQ ID NO:915; and (ii) a VL comprising a VL CDR1, a VL CDR2, and a VL CDR3 having an amino acid sequence of a VL CDR1, a VL CDR2, and a VL CDR3, respectively, of a VL having an amino acid sequence of SEQ ID NO:916. In one embodiment, the TRGV9 antibody comprises: (i) a VH comprising a VH CDR1, a VH CDR2, and a VH CDR3 having an amino acid sequence of a VH CDR1, a VH CDR2, and a VH CDR3, respectively, of a VH having an amino acid sequence of SEQ ID NO:949; and (ii) a VL comprising a VL CDR1, a VL CDR2, and a VL CDR3 having an amino acid sequence of a VL CDR1, a VL CDR2, and a VL CDR3, respectively, of a VL having an amino acid sequence of SEQ ID NO:950. In one embodiment, the TRGV9 antibody comprises: (i) a VH comprising a VH CDR1, a VH CDR2, and a VH CDR3 having an amino acid sequence of a VH CDR1, a VH CDR2, and a VH CDR3, respectively, of a VH having an amino acid sequence of SEQ ID NO:983; and (ii) a VL comprising a VL CDR1, a VL CDR2, and a VL CDR3 having an amino acid sequence of a VL CDR1, a VL CDR2, and a VL CDR3, respectively, of a VL having an amino acid sequence of SEQ ID NO:984. In one embodiment, the TRGV9 antibody comprises: (i) a VH comprising a VH CDR1, a VH CDR2, and a VH CDR3 having an amino acid sequence of a VH CDR1, a VH CDR2, and a VH CDR3, respectively, of a VH having an amino acid sequence of SEQ ID NO:1017; and (ii) a VL comprising a VL CDR1, a VL CDR2, and a VL CDR3 having an amino acid sequence of a VL CDR1, a VL CDR2, and a VL CDR3, respectively, of a VL having an amino acid sequence of SEQ ID NO:1018. In one embodiment, the TRGV9 antibody comprises: (i) a VH comprising a VH CDR1, a VH CDR2, and a VH CDR3 having an amino acid sequence of a VH CDR1, a VH CDR2, and a VH CDR3, respectively, of a VH having an amino acid sequence of SEQ ID NO:1051; and (ii) a VL comprising a VL CDR1, a VL CDR2, and a VL CDR3 having an amino acid sequence of a VL CDR1, a VL CDR2, and a VL CDR3, respectively, of a VL having an amino acid sequence of SEQ ID NO:1052. In one embodiment, the TRGV9 antibody comprises: (i) a VH comprising a VH CDR1, a VH CDR2, and a VH CDR3 having an amino acid sequence of a VH CDR1, a VH CDR2, and a VH CDR3, respectively, of a VH having an amino acid sequence of SEQ ID NO:1085; and (ii) a VL comprising a VL CDR1, a VL CDR2, and a VL CDR3 having an amino acid sequence of a VL CDR1, a VL CDR2, and a VL CDR3, respectively, of a VL having an amino acid sequence of SEQ ID NO:1086. In one embodiment, the TRGV9 antibody comprises: (i) a VH comprising a VH CDR1, a VH CDR2, and a VH CDR3 having an amino acid sequence of a VH CDR1, a VH CDR2, and a VH CDR3, respectively, of a VH having an amino acid sequence of SEQ ID NO:1119; and (ii) a VL comprising a VL CDR1, a VL CDR2, and a VL CDR3 having an amino acid sequence of a VL CDR1, a VL CDR2, and a VL CDR3, respectively, of a VL having an amino acid sequence of SEQ ID NO:1120. In one embodiment, the TRGV9 antibody comprises: (i) a VH comprising a VH CDR1, a VH CDR2, and a VH CDR3 having an amino acid sequence of a VH CDR1, a VH CDR2, and a VH CDR3, respectively, of a VH having an amino acid sequence of SEQ ID NO:1153; and (ii) a VL comprising a VL CDR1, a VL CDR2, and a VL CDR3 having an amino acid sequence of a VL CDR1, a VL CDR2, and a VL CDR3, respectively, of a VL having an amino acid sequence of SEQ ID NO:1154. In one embodiment, the TRGV9 antibody comprises: (i) a VH comprising a VH CDR1, a VH CDR2, and a VH CDR3 having an amino acid sequence of a VH CDR1, a VH CDR2, and a VH CDR3, respectively, of a VH having an amino acid sequence of SEQ ID NO:1187; and (ii) a VL comprising a VL CDR1, a VL CDR2, and a VL CDR3 having an amino acid sequence of a VL CDR1, a VL CDR2, and a VL CDR3, respectively, of a VL having an amino acid sequence of SEQ ID NO:1188. In one embodiment, the TRGV9 antibody comprises: (i) a VH comprising a VH CDR1, a VH CDR2, and a VH CDR3 having an amino acid sequence of a VH CDR1, a VH CDR2, and a VH CDR3, respectively, of a VH having an amino acid sequence of SEQ ID NO:1221; and (ii) a VL comprising a VL CDR1, a VL CDR2, and a VL CDR3 having an amino acid sequence of a VL CDR1, a VL CDR2, and a VL CDR3, respectively, of a VL having an amino acid sequence of SEQ ID NO:1222. In one embodiment, the TRGV9 antibody comprises: (i) a VH comprising a VH CDR1, a VH CDR2, and a VH CDR3 having an amino acid sequence of a VH CDR1, a VH CDR2, and a VH CDR3, respectively, of a VH having an amino acid sequence of SEQ ID NO:1255; and (ii) a VL comprising a VL CDR1, a VL CDR2, and a VL CDR3 having an amino acid sequence of a VL CDR1, a VL CDR2, and a VL CDR3, respectively, of a VL having an amino acid sequence of SEQ ID NO:1256. In one embodiment, the TRGV9 antibody comprises: (i) a VH comprising a VH CDR1, a VH CDR2, and a VH CDR3 having an amino acid sequence of a VH CDR1, a VH CDR2, and a VH CDR3, respectively, of a VH having an amino acid sequence of SEQ ID NO:1289; and (ii) a VL comprising a VL CDR1, a VL CDR2, and a VL CDR3 having an amino acid sequence of a VL CDR1, a VL CDR2, and a VL CDR3, respectively, of a VL having an amino acid sequence of SEQ ID NO:1290. In one embodiment, the TRGV9 antibody comprises: (i) a VH comprising a VH CDR1, a VH CDR2, and a VH CDR3 having an amino acid sequence of a VH CDR1, a VH CDR2, and a VH CDR3, respectively, of a VH having an amino acid sequence of SEQ ID NO:1323; and (ii) a VL comprising a VL CDR1, a VL CDR2, and a VL CDR3 having an amino acid sequence of a VL CDR1, a VL CDR2, and a VL CDR3, respectively, of a VL having an amino acid sequence of SEQ ID NO:1324. In one embodiment, the TRGV9 antibody comprises: (i) a VH comprising a VH CDR1, a VH CDR2, and a VH CDR3 having an amino acid sequence of a VH CDR1, a VH CDR2, and a VH CDR3, respectively, of a VH having an amino acid sequence of SEQ ID NO:1357; and (ii) a VL comprising a VL CDR1, a VL CDR2, and a VL CDR3 having an amino acid sequence of a VL CDR1, a VL CDR2, and a VL CDR3, respectively, of a VL having an amino acid sequence of SEQ ID NO:1358. In one embodiment, the TRGV9 antibody comprises: (i) a VH comprising a VH CDR1, a VH CDR2, and a VH CDR3 having an amino acid sequence of a VH CDR1, a VH CDR2, and a VH CDR3, respectively, of a VH having an amino acid sequence of SEQ ID NO:1391; and (ii) a VL comprising a VL CDR1, a VL CDR2, and a VL CDR3 having an amino acid sequence of a VL CDR1, a VL CDR2, and a VL CDR3, respectively, of a VL having an amino acid sequence of SEQ ID NO:1392. In one embodiment, the TRGV9 antibody comprises: (i) a VH comprising a VH CDR1, a VH CDR2, and a VH CDR3 having an amino acid sequence of a VH CDR1, a VH CDR2, and a VH CDR3, respectively, of a VH having an amino acid sequence of SEQ ID NO:1425; and (ii) a VL comprising a VL CDR1, a VL CDR2, and a VL CDR3 having an amino acid sequence of a VL CDR1, a VL CDR2, and a VL CDR3, respectively, of a VL having an amino acid sequence of SEQ ID NO:1426. In one embodiment, the TRGV9 antibody comprises: (i) a VH comprising a VH CDR1, a VH CDR2, and a VH CDR3 having an amino acid sequence of a VH CDR1, a VH CDR2, and a VH CDR3, respectively, of a VH having an amino acid sequence of SEQ ID NO:1459; and (ii) a VL comprising a VL CDR1, a VL CDR2, and a VL CDR3 having an amino acid sequence of a VL CDR1, a VL CDR2, and a VL CDR3, respectively, of a VL having an amino acid sequence of SEQ ID NO:1460. In one embodiment, the TRGV9 antibody comprises: (i) a VH comprising a VH CDR1, a VH CDR2, and a VH CDR3 having an amino acid sequence of a VH CDR1, a VH CDR2, and a VH CDR3, respectively, of a VH having an amino acid sequence of SEQ ID NO:1493; and (ii) a VL comprising a VL CDR1, a VL CDR2, and a VL CDR3 having an amino acid sequence of a VL CDR1, a VL CDR2, and a VL CDR3, respectively, of a VL having an amino acid sequence of SEQ ID NO:1494. In one embodiment, the TRGV9 antibody comprises: (i) a VH comprising a VH CDR1, a VH CDR2, and a VH CDR3 having an amino acid sequence of a VH CDR1, a VH CDR2, and a VH CDR3, respectively, of a VH having an amino acid sequence of SEQ ID NO:1527; and (ii) a VL comprising a VL CDR1, a VL CDR2, and a VL CDR3 having an amino acid sequence of a VL CDR1, a VL CDR2, and a VL CDR3, respectively, of a VL having an amino acid sequence of SEQ ID NO:1528. In one embodiment, the TRGV9 antibody comprises: (i) a VH comprising a VH CDR1, a VH CDR2, and a VH CDR3 having an amino acid sequence of a VH CDR1, a VH CDR2, and a VH CDR3, respectively, of a VH having an amino acid sequence of SEQ ID NO:1561; and (ii) a VL comprising a VL CDR1, a VL CDR2, and a VL CDR3 having an amino acid sequence of a VL CDR1, a VL CDR2, and a VL CDR3, respectively, of a VL having an amino acid sequence of SEQ ID NO:1562. In one embodiment, the TRGV9 antibody comprises: (i) a VH comprising a VH CDR1, a VH CDR2, and a VH CDR3 having an amino acid sequence of a VH CDR1, a VH CDR2, and a VH CDR3, respectively, of a VH having an amino acid sequence of SEQ ID NO:1595; and (ii) a VL comprising a VL CDR1, a VL CDR2, and a VL CDR3 having an amino acid sequence of a VL CDR1, a VL CDR2, and a VL CDR3, respectively, of a VL having an amino acid sequence of SEQ ID NO:1596. In one embodiment, the TRGV9 antibody comprises: (i) a VH comprising a VH CDR1, a VH CDR2, and a VH CDR3 having an amino acid sequence of a VH CDR1, a VH CDR2, and a VH CDR3, respectively, of a VH having an amino acid sequence of SEQ ID NO:1629; and (ii) a VL comprising a VL CDR1, a VL CDR2, and a VL CDR3 having an amino acid sequence of a VL CDR1, a VL CDR2, and a VL CDR3, respectively, of a VL having an amino acid sequence of SEQ ID NO:1630. In one embodiment, the TRGV9 antibody comprises: (i) a VH comprising a VH CDR1, a VH CDR2, and a VH CDR3 having an amino acid sequence of a VH CDR1, a VH CDR2, and a VH CDR3, respectively, of a VH having an amino acid sequence of SEQ ID NO:1663; and (ii) a VL comprising a VL CDR1, a VL CDR2, and a VL CDR3 having an amino acid sequence of a VL CDR1, a VL CDR2, and a VL CDR3, respectively, of a VL having an amino acid sequence of SEQ ID NO:1664. In one embodiment, the TRGV9 antibody comprises: (i) a VH comprising a VH CDR1, a VH CDR2, and a VH CDR3 having an amino acid sequence of a VH CDR1, a VH CDR2, and a VH CDR3, respectively, of a VH having an amino acid sequence of SEQ ID NO:1697; and (ii) a VL comprising a VL CDR1, a VL CDR2, and a VL CDR3 having an amino acid sequence of a VL CDR1, a VL CDR2, and a VL CDR3, respectively, of a VL having an amino acid sequence of SEQ ID NO:1698. In one embodiment, the TRGV9 antibody comprises: (i) a VH comprising a VH CDR1, a VH CDR2, and a VH CDR3 having an amino acid sequence of a VH CDR1, a VH CDR2, and a VH CDR3, respectively, of a VH having an amino acid sequence of SEQ ID NO:1731; and (ii) a VL comprising a VL CDR1, a VL CDR2, and a VL CDR3 having an amino acid sequence of a VL CDR1, a VL CDR2, and a VL CDR3, respectively, of a VL having an amino acid sequence of SEQ ID NO:1732. In one embodiment, the TRGV9 antibody comprises: (i) a VH comprising a VH CDR1, a VH CDR2, and a VH CDR3 having an amino acid sequence of a VH CDR1, a VH CDR2, and a VH CDR3, respectively, of a VH having an amino acid sequence of SEQ ID NO:1765; and (ii) a VL comprising a VL CDR1, a VL CDR2, and a VL CDR3 having an amino acid sequence of a VL CDR1, a VL CDR2, and a VL CDR3, respectively, of a VL having an amino acid sequence of SEQ ID NO:1766. In one embodiment, the TRGV9 antibody comprises: (i) a VH comprising a VH CDR1, a VH CDR2, and a VH CDR3 having an amino acid sequence of a VH CDR1, a VH CDR2, and a VH CDR3, respectively, of a VH having an amino acid sequence of SEQ ID NO:1799; and (ii) a VL comprising a VL CDR1, a VL CDR2, and a VL CDR3 having an amino acid sequence of a VL CDR1, a VL CDR2, and a VL CDR3, respectively, of a VL having an amino acid sequence of SEQ ID NO:1800. In one embodiment, the TRGV9 antibody comprises: (i) a VH comprising a VH CDR1, a VH CDR2, and a VH CDR3 having an amino acid sequence of a VH CDR1, a VH CDR2, and a VH CDR3, respectively, of a VH having an amino acid sequence of SEQ ID NO:1833; and (ii) a VL comprising a VL CDR1, a VL CDR2, and a VL CDR3 having an amino acid sequence of a VL CDR1, a VL CDR2, and a VL CDR3, respectively, of a VL having an amino acid sequence of SEQ ID NO:1834. In one embodiment, the TRGV9 antibody comprises: (i) a VH comprising a VH CDR1, a VH CDR2, and a VH CDR3 having an amino acid sequence of a VH CDR1, a VH CDR2, and a VH CDR3, respectively, of a VH having an amino acid sequence of SEQ ID NO:1867; and (ii) a VL comprising a VL CDR1, a VL CDR2, and a VL CDR3 having an amino acid sequence of a VL CDR1, a VL CDR2, and a VL CDR3, respectively, of a VL having an amino acid sequence of SEQ ID NO:1868. In one embodiment, the TRGV9 antibody comprises: (i) a VH comprising a VH CDR1, a VH CDR2, and a VH CDR3 having an amino acid sequence of a VH CDR1, a VH CDR2, and a VH CDR3, respectively, of a VH having an amino acid sequence of SEQ ID NO:1901; and (ii) a VL comprising a VL CDR1, a VL CDR2, and a VL CDR3 having an amino acid sequence of a VL CDR1, a VL CDR2, and a VL CDR3, respectively, of a VL having an amino acid sequence of SEQ ID NO:1902. In one embodiment, the TRGV9 antibody comprises: (i) a VH comprising a VH CDR1, a VH CDR2, and a VH CDR3 having an amino acid sequence of a VH CDR1, a VH CDR2, and a VH CDR3, respectively, of a VH having an amino acid sequence of SEQ ID NO:1935; and (ii) a VL comprising a VL CDR1, a VL CDR2, and a VL CDR3 having an amino acid sequence of a VL CDR1, a VL CDR2, and a VL CDR3, respectively, of a VL having an amino acid sequence of SEQ ID NO:1936. In one embodiment, the TRGV9 antibody comprises: (i) a VH comprising a VH CDR1, a VH CDR2, and a VH CDR3 having an amino acid sequence of a VH CDR1, a VH CDR2, and a VH CDR3, respectively, of a VH having an amino acid sequence of SEQ ID NO:1969; and (ii) a VL comprising a VL CDR1, a VL CDR2, and a VL CDR3 having an amino acid sequence of a VL CDR1, a VL CDR2, and a VL CDR3, respectively, of a VL having an amino acid sequence of SEQ ID NO:1970. In one embodiment, the TRGV9 antibody comprises: (i) a VH comprising a VH CDR1, a VH CDR2, and a VH CDR3 having an amino acid sequence of a VH CDR1, a VH CDR2, and a VH CDR3, respectively, of a VH having an amino acid sequence of SEQ ID NO:2003; and (ii) a VL comprising a VL CDR1, a VL CDR2, and a VL CDR3 having an amino acid sequence of a VL CDR1, a VL CDR2, and a VL CDR3, respectively, of a VL having an amino acid sequence of SEQ ID NO:2004.

[0005] In some embodiments, the VH CDR1, VH CDR2, VH CDR3, VL CDR1, VL CDR2, and VL CDR3 amino acid sequences of the TRGV9 antibody are according to the Kabat numbering system. In some embodiments, the VH CDR1, VH CDR2, VH CDR3, VL CDR1, VL CDR2, and VL CDR3 amino acid sequences of the TRGV9 antibody are according to the Chothia numbering system. In some embodiments, the VH CDR1, VH CDR2, VH CDR3, VL CDR1, VL CDR2, and VL CDR3 amino acid sequences of the TRGV9 antibody are according to the AbM numbering system. In some embodiments, the VH CDR1, VH CDR2, VH CDR3, VL CDR1, VL CDR2, and VL CDR3 amino acid sequences of the TRGV9 antibody are according to the Contact numbering system. In some embodiments, the VH CDR1, VH CDR2, VH CDR3, VL CDR1, VL CDR2, and VL CDR3 amino acid sequences of the TRGV9 antibody are according to the IMGT numbering system.

[0006] In some embodiments, the antibody binds a TRGV9 antigen. In some embodiments, antibody binds a TRGV9 epitope. In some embodiments, the antibody specifically binds to TRGV9. In some embodiments, the VH CDR1, VH CDR2, VH CDR3, VL CDR1, VL CDR2 and VL CDR3 form a binding site for an antigen of the TRGV9. In some embodiments, the VH CDR1, VH CDR2, VH CDR3, VL CDR1, VL CDR2 and VL CDR3 form a binding site for an epitope of the TRGV9. In some embodiments, the TRGV9 is present on the surface of a T cell.

[0007] In some embodiments, the TRGV9 antibody is a humanized antibody. In some embodiments, the antibody is an IgG antibody. In some embodiments, the TRGV9 antibody is an IgG1 antibody. In some embodiments, the TRGV9 antibody is an IgG2 antibody. In some embodiments, the TRGV9 antibody is an IgG3 antibody. In some embodiments, the TRGV9 antibody is an IgG4 antibody. In some embodiments, the TRGV9 antibody comprises a kappa light chain. In some embodiments, the TRGV9 the antibody comprises a lambda light chain. In some embodiments, the TRGV9 antibody is a monoclonal antibody. In some embodiments, the TRGV9 antibody is multivalent. In some embodiments, the TRGV9 antibody is capable of binding at least three antigens. In some embodiments, the TRGV9 antibody is capable of binding at least five antigens. In some embodiments, the TRGV9 antibody is a multispecific antibody. In some embodiments, the TRGV9 antibody is a bispecific antibody.

[0008] In another aspect, provided is a nucleic acid sequence encoding a TRGV9 antibody provided herein. Also provided is a vector comprising a nucleic acid sequence encoding a TRGV9 antibody provided herein. Also provided is a host cell comprising a vector comprising a nucleic acid sequence encoding a TRGV9 antibody provided herein. Also provided is a kit comprising vector comprising a nucleic acid sequence encoding a TRGV9 antibody provided herein, and packaging for the same.

[0009] In another aspect, provided is a kit comprising a TRGV9 antibody provided herein, and packaging for the same.

[0010] In another aspect, provided is a pharmaceutical composition comprising a TRGV9 antibody provided herein, and a pharmaceutically acceptable carrier.

[0011] In another aspect, provided is a method of producing a pharmaceutical composition comprising a TRGV9 antibody provided herein, comprising combining the TRGV9 antibody with a pharmaceutically acceptable carrier to obtain the pharmaceutical composition.

[0012] In another aspect, provided is a method of activating a T cell expressing TRGV9, comprising contacting the T cell with a TRGV9 antibody provided herein. In certain embodiments, the contacting results in an increase in CD69, CD25, and/or Granzyme B expression, as compared to a control T cell expressing TRGV9.

[0013] In another aspect, provided herein is an antibody that binds TRDV2. In one embodiment, the TRDV2 antibody comprises: (i) a VH comprising a VH CDR1, a VH CDR2, and a VH CDR3 having an amino acid sequence of a VH CDR1, a VH CDR2, and a VH CDR3, respectively, of a VH having an amino acid sequence of SEQ ID NO:2037; and (ii) a VL comprising a VL CDR1, a VL CDR2, and a VL CDR3 having an amino acid sequence of a VL CDR1, a VL CDR2, and a VL CDR3, respectively, of a VL having an amino acid sequence of SEQ ID NO:2038. In one embodiment, the TRDV2 antibody comprises: (i) a VH comprising a VH CDR1, a VH CDR2, and a VH CDR3 having an amino acid sequence of a VH CDR1, a VH CDR2, and a VH CDR3, respectively, of a VH having an amino acid sequence of SEQ ID NO:2071; and (ii) a VL comprising a VL CDR1, a VL CDR2, and a VL CDR3 having an amino acid sequence of a VL CDR1, a VL CDR2, and a VL CDR3, respectively, of a VL having an amino acid sequence of SEQ ID NO:2072. In one embodiment, the TRDV2 antibody comprises: (i) a VH comprising a VH CDR1, a VH CDR2, and a VH CDR3 having an amino acid sequence of a VH CDR1, a VH CDR2, and a VH CDR3, respectively, of a VH having an amino acid sequence of SEQ ID NO:2105; and (ii) a VL comprising a VL CDR1, a VL CDR2, and a VL CDR3 having an amino acid sequence of a VL CDR1, a VL CDR2, and a VL CDR3, respectively, of a VL having an amino acid sequence of SEQ ID NO:2106. In one embodiment, the TRDV2 antibody comprises: (i) a VH comprising a VH CDR1, a VH CDR2, and a VH CDR3 having an amino acid sequence of a VH CDR1, a VH CDR2, and a VH CDR3, respectively, of a VH having an amino acid sequence of SEQ ID NO:2139; and (ii) a VL comprising a VL CDR1, a VL CDR2, and a VL CDR3 having an amino acid sequence of a VL CDR1, a VL CDR2, and a VL CDR3, respectively, of a VL having an amino acid sequence of SEQ ID NO:2140. In one embodiment, the TRDV2 antibody comprises: (i) a VH comprising a VH CDR1, a VH CDR2, and a VH CDR3 having an amino acid sequence of a VH CDR1, a VH CDR2, and a VH CDR3, respectively, of a VH having an amino acid sequence of SEQ ID NO:2173; and (ii) a VL comprising a VL CDR1, a VL CDR2, and a VL CDR3 having an amino acid sequence of a VL CDR1, a VL CDR2, and a VL CDR3, respectively, of a VL having an amino acid sequence of SEQ ID NO:2174. In one embodiment, the TRDV2 antibody comprises: (i) a VH comprising a VH CDR1, a VH CDR2, and a VH CDR3 having an amino acid sequence of a VH CDR1, a VH CDR2, and a VH CDR3, respectively, of a VH having an amino acid sequence of SEQ ID NO:2207; and (ii) a VL comprising a VL CDR1, a VL CDR2, and a VL CDR3 having an amino acid sequence of a VL CDR1, a VL CDR2, and a VL CDR3, respectively, of a VL having an amino acid sequence of SEQ ID NO:2208. In one embodiment, the TRDV2 antibody comprises: (i) a VH comprising a VH CDR1, a VH CDR2, and a VH CDR3 having an amino acid sequence of a VH CDR1, a VH CDR2, and a VH CDR3, respectively, of a VH having an amino acid sequence of SEQ ID NO:2241; and (ii) a VL comprising a VL CDR1, a VL CDR2, and a VL CDR3 having an amino acid sequence of a VL CDR1, a VL CDR2, and a VL CDR3, respectively, of a VL having an amino acid sequence of SEQ ID NO:2242. In one embodiment, the TRDV2 antibody comprises: (i) a VH comprising a VH CDR1, a VH CDR2, and a VH CDR3 having an amino acid sequence of a VH CDR1, a VH CDR2, and a VH CDR3, respectively, of a VH having an amino acid sequence of SEQ ID NO:2275; and (ii) a VL comprising a VL CDR1, a VL CDR2, and a VL CDR3 having an amino acid sequence of a VL CDR1, a VL CDR2, and a VL CDR3, respectively, of a VL having an amino acid sequence of SEQ ID NO:2276. In one embodiment, the TRDV2 antibody comprises: (i) a VH comprising a VH CDR1, a VH CDR2, and a VH CDR3 having an amino acid sequence of a VH CDR1, a VH CDR2, and a VH CDR3, respectively, of a VH having an amino acid sequence of SEQ ID NO:2309; and (ii) a VL comprising a VL CDR1, a VL CDR2, and a VL CDR3 having an amino acid sequence of a VL CDR1, a VL CDR2, and a VL CDR3, respectively, of a VL having an amino acid sequence of SEQ ID NO:2310. In one embodiment, the TRDV2 antibody comprises: (i) a VH comprising a VH CDR1, a VH CDR2, and a VH CDR3 having an amino acid sequence of a VH CDR1, a VH CDR2, and a VH CDR3, respectively, of a VH having an amino acid sequence of SEQ ID NO:2343; and (ii) a VL comprising a VL CDR1, a VL CDR2, and a VL CDR3 having an amino acid sequence of a VL CDR1, a VL CDR2, and a VL CDR3, respectively, of a VL having an amino acid sequence of SEQ ID NO:2344. In one embodiment, the TRDV2 antibody comprises: (i) a VH comprising a VH CDR1, a VH CDR2, and a VH CDR3 having an amino acid sequence of a VH CDR1, a VH CDR2, and a VH CDR3, respectively, of a VH having an amino acid sequence of SEQ ID NO:2377; and (ii) a VL comprising a VL CDR1, a VL CDR2, and a VL CDR3 having an amino acid sequence of a VL CDR1, a VL CDR2, and a VL CDR3, respectively, of a VL having an amino acid sequence of SEQ ID NO:2378. In one embodiment, the TRDV2 antibody comprises: (i) a VH comprising a VH CDR1, a VH CDR2, and a VH CDR3 having an amino acid sequence of a VH CDR1, a VH CDR2, and a VH CDR3, respectively, of a VH having an amino acid sequence of SEQ ID NO:2411; and (ii) a VL comprising a VL CDR1, a VL CDR2, and a VL CDR3 having an amino acid sequence of a VL CDR1, a VL CDR2, and a VL CDR3, respectively, of a VL having an amino acid sequence of SEQ ID NO:2412. In one embodiment, the TRDV2 antibody comprises: (i) a VH comprising a VH CDR1, a VH CDR2, and a VH CDR3 having an amino acid sequence of a VH CDR1, a VH CDR2, and a VH CDR3, respectively, of a VH having an amino acid sequence of SEQ ID NO:2445; and (ii) a VL comprising a VL CDR1, a VL CDR2, and a VL CDR3 having an amino acid sequence of a VL CDR1, a VL CDR2, and a VL CDR3, respectively, of a VL having an amino acid sequence of SEQ ID NO:2446. In one embodiment, the TRDV2 antibody comprises: (i) a VH comprising a VH CDR1, a VH CDR2, and a VH CDR3 having an amino acid sequence of a VH CDR1, a VH CDR2, and a VH CDR3, respectively, of a VH having an amino acid sequence of SEQ ID NO:2479; and (ii) a VL comprising a VL CDR1, a VL CDR2, and a VL CDR3 having an amino acid sequence of a VL CDR1, a VL CDR2, and a VL CDR3, respectively, of a VL having an amino acid sequence of SEQ ID NO:2480. In one embodiment, the TRDV2 antibody comprises: (i) a VH comprising a VH CDR1, a VH CDR2, and a VH CDR3 having an amino acid sequence of a VH CDR1, a VH CDR2, and a VH CDR3, respectively, of a VH having an amino acid sequence of SEQ ID NO:2513; and (ii) a VL comprising a VL CDR1, a VL CDR2, and a VL CDR3 having an amino acid sequence of a VL CDR1, a VL CDR2, and a VL CDR3, respectively, of a VL having an amino acid sequence of SEQ ID NO:2514. In one embodiment, the TRDV2 antibody comprises: (i) a VH comprising a VH CDR1, a VH CDR2, and a VH CDR3 having an amino acid sequence of a VH CDR1, a VH CDR2, and a VH CDR3, respectively, of a VH having an amino acid sequence of SEQ ID NO:2547; and (ii) a VL comprising a VL CDR1, a VL CDR2, and a VL CDR3 having an amino acid sequence of a VL CDR1, a VL CDR2, and a VL CDR3, respectively, of a VL having an amino acid sequence of SEQ ID NO:2548. In one embodiment, the TRDV2 antibody comprises: (i) a VH comprising a VH CDR1, a VH CDR2, and a VH CDR3 having an amino acid sequence of a VH CDR1, a VH CDR2, and a VH CDR3, respectively, of a VH having an amino acid sequence of SEQ ID NO:2581; and (ii) a VL comprising a VL CDR1, a VL CDR2, and a VL CDR3 having an amino acid sequence of a VL CDR1, a VL CDR2, and a VL CDR3, respectively, of a VL having an amino acid sequence of SEQ ID NO:2582. In one embodiment, the TRDV2 antibody comprises: (i) a VH comprising a VH CDR1, a VH CDR2, and a VH CDR3 having an amino acid sequence of a VH CDR1, a VH CDR2, and a VH CDR3, respectively, of a VH having an amino acid sequence of SEQ ID NO:2615; and (ii) a VL comprising a VL CDR1, a VL CDR2, and a VL CDR3 having an amino acid sequence of a VL CDR1, a VL CDR2, and a VL CDR3, respectively, of a VL having an amino acid sequence of SEQ ID NO:2616. In one embodiment, the TRDV2 antibody comprises: (i) a VH comprising a VH CDR1, a VH CDR2, and a VH CDR3 having an amino acid sequence of a VH CDR1, a VH CDR2, and a VH CDR3, respectively, of a VH having an amino acid sequence of SEQ ID NO:2649; and (ii) a VL comprising a VL CDR1, a VL CDR2, and a VL CDR3 having an amino acid sequence of a VL CDR1, a VL CDR2, and a VL CDR3, respectively, of a VL having an amino acid sequence of SEQ ID NO:2650. In one embodiment, the TRDV2 antibody comprises: (i) a VH comprising a VH CDR1, a VH CDR2, and a VH CDR3 having an amino acid sequence of a VH CDR1, a VH CDR2, and a VH CDR3, respectively, of a VH having an amino acid sequence of SEQ ID NO:2683; and (ii) a VL comprising a VL CDR1, a VL CDR2, and a VL CDR3 having an amino acid sequence of a VL CDR1, a VL CDR2, and a VL CDR3, respectively, of a VL having an amino acid sequence of SEQ ID NO:2684. In one embodiment, the TRDV2 antibody comprises: (i) a VH comprising a VH CDR1, a VH CDR2, and a VH CDR3 having an amino acid sequence of a VH CDR1, a VH CDR2, and a VH CDR3, respectively, of a VH having an amino acid sequence of SEQ ID NO:2717; and (ii) a VL comprising a VL CDR1, a VL CDR2, and a VL CDR3 having an amino acid sequence of a VL CDR1, a VL CDR2, and a VL CDR3, respectively, of a VL having an amino acid sequence of SEQ ID NO:2718. In one embodiment, the TRDV2 antibody comprises: (i) a VH comprising a VH CDR1, a VH CDR2, and a VH CDR3 having an amino acid sequence of a VH CDR1, a VH CDR2, and a VH CDR3, respectively, of a VH having an amino acid sequence of SEQ ID NO:2751; and (ii) a VL comprising a VL CDR1, a VL CDR2, and a VL CDR3 having an amino acid sequence of a VL CDR1, a VL CDR2, and a VL CDR3, respectively, of a VL having an amino acid sequence of SEQ ID NO:2752. In one embodiment, the TRDV2 antibody comprises: (i) a VH comprising a VH CDR1, a VH CDR2, and a VH CDR3 having an amino acid sequence of a VH CDR1, a VH CDR2, and a VH CDR3, respectively, of a VH having an amino acid sequence of SEQ ID NO:2785; and (ii) a VL comprising a VL CDR1, a VL CDR2, and a VL CDR3 having an amino acid sequence of a VL CDR1, a VL CDR2, and a VL CDR3, respectively, of a VL having an amino acid sequence of SEQ ID NO:2786. In one embodiment, the TRDV2 antibody comprises: (i) a VH comprising a VH CDR1, a VH CDR2, and a VH CDR3 having an amino acid sequence of a VH CDR1, a VH CDR2, and a VH CDR3, respectively, of a VH having an amino acid sequence of SEQ ID NO:2819; and (ii) a VL comprising a VL CDR1, a VL CDR2, and a VL CDR3 having an amino acid sequence of a VL CDR1, a VL CDR2, and a VL CDR3, respectively, of a VL having an amino acid sequence of SEQ ID NO:2820. In one embodiment, the TRDV2 antibody comprises: (i) a VH comprising a VH CDR1, a VH CDR2, and a VH CDR3 having an amino acid sequence of a VH CDR1, a VH CDR2, and a VH CDR3, respectively, of a VH having an amino acid sequence of SEQ ID NO:2853; and (ii) a VL comprising a VL CDR1, a VL CDR2, and a VL CDR3 having an amino acid sequence of a VL CDR1, a VL CDR2, and a VL CDR3, respectively, of a VL having an amino acid sequence of SEQ ID NO:2854. In one embodiment, the TRDV2 antibody comprises: (i) a VH comprising a VH CDR1, a VH CDR2, and a VH CDR3 having an amino acid sequence of a VH CDR1, a VH CDR2, and a VH CDR3, respectively, of a VH having an amino acid sequence of SEQ ID NO:2887; and (ii) a VL comprising a VL CDR1, a VL CDR2, and a VL CDR3 having an amino acid sequence of a VL CDR1, a VL CDR2, and a VL CDR3, respectively, of a VL having an amino acid sequence of SEQ ID NO:2888. In one embodiment, the TRDV2 antibody comprises: (i) a VH comprising a VH CDR1, a VH CDR2, and a VH CDR3 having an amino acid sequence of a VH CDR1, a VH CDR2, and a VH CDR3, respectively, of a VH having an amino acid sequence of SEQ ID NO:2921; and (ii) a VL comprising a VL CDR1, a VL CDR2, and a VL CDR3 having an amino acid sequence of a VL CDR1, a VL CDR2, and a VL CDR3, respectively, of a VL having an amino acid sequence of SEQ ID NO:2922. In one embodiment, the TRDV2 antibody comprises: (i) a VH comprising a VH CDR1, a VH CDR2, and a VH CDR3 having an amino acid sequence of a VH CDR1, a VH CDR2, and a VH CDR3, respectively, of a VH having an amino acid sequence of SEQ ID NO:2955; and (ii) a VL comprising a VL CDR1, a VL CDR2, and a VL CDR3 having an amino acid sequence of a VL CDR1, a VL CDR2, and a VL CDR3, respectively, of a VL having an amino acid sequence of SEQ ID NO:2956. In one embodiment, the TRDV2 antibody comprises: (i) a VH comprising a VH CDR1, a VH CDR2, and a VH CDR3 having an amino acid sequence of a VH CDR1, a VH CDR2, and a VH CDR3, respectively, of a VH having an amino acid sequence of SEQ ID NO:2989; and (ii) a VL comprising a VL CDR1, a VL CDR2, and a VL CDR3 having an amino acid sequence of a VL CDR1, a VL CDR2, and a VL CDR3, respectively, of a VL having an amino acid sequence of SEQ ID NO:2990. In one embodiment, the TRDV2 antibody comprises: (i) a VH comprising a VH CDR1, a VH CDR2, and a VH CDR3 having an amino acid sequence of a VH CDR1, a VH CDR2, and a VH CDR3, respectively, of a VH having an amino acid sequence of SEQ ID NO:3023; and (ii) a VL comprising a VL CDR1, a VL CDR2, and a VL CDR3 having an amino acid sequence of a VL CDR1, a VL CDR2, and a VL CDR3, respectively, of a VL having an amino acid sequence of SEQ ID NO:3024. In one embodiment, the TRDV2 antibody comprises: (i) a VH comprising a VH CDR1, a VH CDR2, and a VH CDR3 having an amino acid sequence of a VH CDR1, a VH CDR2, and a VH CDR3, respectively, of a VH having an amino acid sequence of SEQ ID NO:3057; and (ii) a VL comprising a VL CDR1, a VL CDR2, and a VL CDR3 having an amino acid sequence of a VL CDR1, a VL CDR2, and a VL CDR3, respectively, of a VL having an amino acid sequence of SEQ ID NO:3058. In one embodiment, the TRDV2 antibody comprises: (i) a VH comprising a VH CDR1, a VH CDR2, and a VH CDR3 having an amino acid sequence of a VH CDR1, a VH CDR2, and a VH CDR3, respectively, of a VH having an amino acid sequence of SEQ ID NO:3091; and (ii) a VL comprising a VL CDR1, a VL CDR2, and a VL CDR3 having an amino acid sequence of a VL CDR1, a VL CDR2, and a VL CDR3, respectively, of a VL having an amino acid sequence of SEQ ID NO:3092. In one embodiment, the TRDV2 antibody comprises: (i) a VH comprising a VH CDR1, a VH CDR2, and a VH CDR3 having an amino acid sequence of a VH CDR1, a VH CDR2, and a VH CDR3, respectively, of a VH having an amino acid sequence of SEQ ID NO:3125; and (ii) a VL comprising a VL CDR1, a VL CDR2, and a VL CDR3 having an amino acid sequence of a VL CDR1, a VL CDR2, and a VL CDR3, respectively, of a VL having an amino acid sequence of SEQ ID NO:3126. In one embodiment, the TRDV2 antibody comprises: (i) a VH comprising a VH CDR1, a VH CDR2, and a VH CDR3 having an amino acid sequence of a VH CDR1, a VH CDR2, and a VH CDR3, respectively, of a VH having an amino acid sequence of SEQ ID NO:3159; and (ii) a VL comprising a VL CDR1, a VL CDR2, and a VL CDR3 having an amino acid sequence of a VL CDR1, a VL CDR2, and a VL CDR3, respectively, of a VL having an amino acid sequence of SEQ ID NO:3160. In one embodiment, the TRDV2 antibody comprises: (i) a VH comprising a VH CDR1, a VH CDR2, and a VH CDR3 having an amino acid sequence of a VH CDR1, a VH CDR2, and a VH CDR3, respectively, of a VH having an amino acid sequence of SEQ ID NO:3193; and (ii) a VL comprising a VL CDR1, a VL CDR2, and a VL CDR3 having an amino acid sequence of a VL CDR1, a VL CDR2, and a VL CDR3, respectively, of a VL having an amino acid sequence of SEQ ID NO:3194. In one embodiment, the TRDV2 antibody comprises: (i) a VH comprising a VH CDR1, a VH CDR2, and a VH CDR3 having an amino acid sequence of a VH CDR1, a VH CDR2, and a VH CDR3, respectively, of a VH having an amino acid sequence of SEQ ID NO:3227; and (ii) a VL comprising a VL CDR1, a VL CDR2, and a VL CDR3 having an amino acid sequence of a VL CDR1, a VL CDR2, and a VL CDR3, respectively, of a VL having an amino acid sequence of SEQ ID NO:3228. In one embodiment, the TRDV2 antibody comprises: (i) a VH comprising a VH CDR1, a VH CDR2, and a VH CDR3 having an amino acid sequence of a VH CDR1, a VH CDR2, and a VH CDR3, respectively, of a VH having an amino acid sequence of SEQ ID NO:3261; and (ii) a VL comprising a VL CDR1, a VL CDR2, and a VL CDR3 having an amino acid sequence of a VL CDR1, a VL CDR2, and a VL CDR3, respectively, of a VL having an amino acid sequence of SEQ ID NO:3262. In one embodiment, the TRDV2 antibody comprises: (i) a VH comprising a VH CDR1, a VH CDR2, and a VH CDR3 having an amino acid sequence of a VH CDR1, a VH CDR2, and a VH CDR3, respectively, of a VH having an amino acid sequence of SEQ ID NO:3295; and (ii) a VL comprising a VL CDR1, a VL CDR2, and a VL CDR3 having an amino acid sequence of a VL CDR1, a VL CDR2, and a VL CDR3, respectively, of a VL having an amino acid sequence of SEQ ID NO:3296. In one embodiment, the TRDV2 antibody comprises: (i) a VH comprising a VH CDR1, a VH CDR2, and a VH CDR3 having an amino acid sequence of a VH CDR1, a VH CDR2, and a VH CDR3, respectively, of a VH having an amino acid sequence of SEQ ID NO:3329; and (ii) a VL comprising a VL CDR1, a VL CDR2, and a VL CDR3 having an amino acid sequence of a VL CDR1, a VL CDR2, and a VL CDR3, respectively, of a VL having an amino acid sequence of SEQ ID NO:3330. In one embodiment, the TRDV2 antibody comprises: (i) a VH comprising a VH CDR1, a VH CDR2, and a VH CDR3 having an amino acid sequence of a VH CDR1, a VH CDR2, and a VH CDR3, respectively, of a VH having an amino acid sequence of SEQ ID NO:3363; and (ii) a VL comprising a VL CDR1, a VL CDR2, and a VL CDR3 having an amino acid sequence of a VL CDR1, a VL CDR2, and a VL CDR3, respectively, of a VL having an amino acid sequence of SEQ ID NO:3364. In one embodiment, the TRDV2 antibody comprises: (i) a VH comprising a VH CDR1, a VH CDR2, and a VH CDR3 having an amino acid sequence of a VH CDR1, a VH CDR2, and a VH CDR3, respectively, of a VH having an amino acid sequence of SEQ ID NO:3397; and (ii) a VL comprising a VL CDR1, a VL CDR2, and a VL CDR3 having an amino acid sequence of a VL CDR1, a VL CDR2, and a VL CDR3, respectively, of a VL having an amino acid sequence of SEQ ID NO:3398. In one embodiment, the TRDV2 antibody comprises: (i) a VH comprising a VH CDR1, a VH CDR2, and a VH CDR3 having an amino acid sequence of a VH CDR1, a VH CDR2, and a VH CDR3, respectively, of a VH having an amino acid sequence of SEQ ID NO:3431; and (ii) a VL comprising a VL CDR1, a VL CDR2, and a VL CDR3 having an amino acid sequence of a VL CDR1, a VL CDR2, and a VL CDR3, respectively, of a VL having an amino acid sequence of SEQ ID NO:3432. In one embodiment, the TRDV2 antibody comprises: (i) a VH comprising a VH CDR1, a VH CDR2, and a VH CDR3 having an amino acid sequence of a VH CDR1, a VH CDR2, and a VH CDR3, respectively, of a VH having an amino acid sequence of SEQ ID NO:3465; and (ii) a VL comprising a VL CDR1, a VL CDR2, and a VL CDR3 having an amino acid sequence of a VL CDR1, a VL CDR2, and a VL CDR3, respectively, of a VL having an amino acid sequence of SEQ ID NO:3466. In one embodiment, the TRDV2 antibody comprises: (i) a VH comprising a VH CDR1, a VH CDR2, and a VH CDR3 having an amino acid sequence of a VH CDR1, a VH CDR2, and a VH CDR3, respectively, of a VH having an amino acid sequence of SEQ ID NO:3499; and (ii) a VL comprising a VL CDR1, a VL CDR2, and a VL CDR3 having an amino acid sequence of a VL CDR1, a VL CDR2, and a VL CDR3, respectively, of a VL having an amino acid sequence of SEQ ID NO:3500. In one embodiment, the TRDV2 antibody comprises: (i) a VH comprising a VH CDR1, a VH CDR2, and a VH CDR3 having an amino acid sequence of a VH CDR1, a VH CDR2, and a VH CDR3, respectively, of a VH having an amino acid sequence of SEQ ID NO:3533; and (ii) a VL comprising a VL CDR1, a VL CDR2, and a VL CDR3 having an amino acid sequence of a VL CDR1, a VL CDR2, and a VL CDR3, respectively, of a VL having an amino acid sequence of SEQ ID NO:3534. In one embodiment, the TRDV2 antibody comprises: (i) a VH comprising a VH CDR1, a VH CDR2, and a VH CDR3 having an amino acid sequence of a VH CDR1, a VH CDR2, and a VH CDR3, respectively, of a VH having an amino acid sequence of SEQ ID NO:3567; and (ii) a VL comprising a VL CDR1, a VL CDR2, and a VL CDR3 having an amino acid sequence of a VL CDR1, a VL CDR2, and a VL CDR3, respectively, of a VL having an amino acid sequence of SEQ ID NO:3568. In one embodiment, the TRDV2 antibody comprises: (i) a VH comprising a VH CDR1, a VH CDR2, and a VH CDR3 having an amino acid sequence of a VH CDR1, a VH CDR2, and a VH CDR3, respectively, of a VH having an amino acid sequence of SEQ ID NO:3601; and (ii) a VL comprising a VL CDR1, a VL CDR2, and a VL CDR3 having an amino acid sequence of a VL CDR1, a VL CDR2, and a VL CDR3, respectively, of a VL having an amino acid sequence of SEQ ID NO:3602. In one embodiment, the TRDV2 antibody comprises: (i) a VH comprising a VH CDR1, a VH CDR2, and a VH CDR3 having an amino acid sequence of a VH CDR1, a VH CDR2, and a VH CDR3, respectively, of a VH having an amino acid sequence of SEQ ID NO:3635; and (ii) a VL comprising a VL CDR1, a VL CDR2, and a VL CDR3 having an amino acid sequence of a VL CDR1, a VL CDR2, and a VL CDR3, respectively, of a VL having an amino acid sequence of SEQ ID NO:3636. In one embodiment, the TRDV2 antibody comprises: (i) a VH comprising a VH CDR1, a VH CDR2, and a VH CDR3 having an amino acid sequence of a VH CDR1, a VH CDR2, and a VH CDR3, respectively, of a VH having an amino acid sequence of SEQ ID NO:3669; and (ii) a VL comprising a VL CDR1, a VL CDR2, and a VL CDR3 having an amino acid sequence of a VL CDR1, a VL CDR2, and a VL CDR3, respectively, of a VL having an amino acid sequence of SEQ ID NO:3670. In one embodiment, the TRDV2 antibody comprises: (i) a VH comprising a VH CDR1, a VH CDR2, and a VH CDR3 having an amino acid sequence of a VH CDR1, a VH CDR2, and a VH CDR3, respectively, of a VH having an amino acid sequence of SEQ ID NO:3703; and (ii) a VL comprising a VL CDR1, a VL CDR2, and a VL CDR3 having an amino acid sequence of a VL CDR1, a VL CDR2, and a VL CDR3, respectively, of a VL having an amino acid sequence of SEQ ID NO:3704. In one embodiment, the TRDV2 antibody comprises: (i) a VH comprising a VH CDR1, a VH CDR2, and a VH CDR3 having an amino acid sequence of a VH CDR1, a VH CDR2, and a VH CDR3, respectively, of a VH having an amino acid sequence of SEQ ID NO:3737; and (ii) a VL comprising a VL CDR1, a VL CDR2, and a VL CDR3 having an amino acid sequence of a VL CDR1, a VL CDR2, and a VL CDR3, respectively, of a VL having an amino acid sequence of SEQ ID NO:3738. In one embodiment, the TRDV2 antibody comprises: (i) a VH comprising a VH CDR1, a VH CDR2, and a VH CDR3 having an amino acid sequence of a VH CDR1, a VH CDR2, and a VH CDR3, respectively, of a VH having an amino acid sequence of SEQ ID NO:3771; and (ii) a VL comprising a VL CDR1, a VL CDR2, and a VL CDR3 having an amino acid sequence of a VL CDR1, a VL CDR2, and a VL CDR3, respectively, of a VL having an amino acid sequence of SEQ ID NO:3772. In one embodiment, the TRDV2 antibody comprises: (i) a VH comprising a VH CDR1, a VH CDR2, and a VH CDR3 having an amino acid sequence of a VH CDR1, a VH CDR2, and a VH CDR3, respectively, of a VH having an amino acid sequence of SEQ ID NO:3805; and (ii) a VL comprising a VL CDR1, a VL CDR2, and a VL CDR3 having an amino acid sequence of a VL CDR1, a VL CDR2, and a VL CDR3, respectively, of a VL having an amino acid sequence of SEQ ID NO:3806. In one embodiment, the TRDV2 antibody comprises: (i) a VH comprising a VH CDR1, a VH CDR2, and a VH CDR3 having an amino acid sequence of a VH CDR1, a VH CDR2, and a VH CDR3, respectively, of a VH having an amino acid sequence of SEQ ID NO:3839; and (ii) a VL comprising a VL CDR1, a VL CDR2, and a VL CDR3 having an amino acid sequence of a VL CDR1, a VL CDR2, and a VL CDR3, respectively, of a VL having an amino acid sequence of SEQ ID NO:3840. In one embodiment, the TRDV2 antibody comprises: (i) a VH comprising a VH CDR1, a VH CDR2, and a VH CDR3 having an amino acid sequence of a VH CDR1, a VH CDR2, and a VH CDR3, respectively, of a VH having an amino acid sequence of SEQ ID NO:3873; and (ii) a VL comprising a VL CDR1, a VL CDR2, and a VL CDR3 having an amino acid sequence of a VL CDR1, a VL CDR2, and a VL CDR3, respectively, of a VL having an amino acid sequence of SEQ ID NO:3874. In one embodiment, the TRDV2 antibody comprises: (i) a VH comprising a VH CDR1, a VH CDR2, and a VH CDR3 having an amino acid sequence of a VH CDR1, a VH CDR2, and a VH CDR3, respectively, of a VH having an amino acid sequence of SEQ ID NO:3907; and (ii) a VL comprising a VL CDR1, a VL CDR2, and a VL CDR3 having an amino acid sequence of a VL CDR1, a VL CDR2, and a VL CDR3, respectively, of a VL having an amino acid sequence of SEQ ID NO:3908. In one embodiment, the TRDV2 antibody comprises: (i) a VH comprising a VH CDR1, a VH CDR2, and a VH CDR3 having an amino acid sequence of a VH CDR1, a VH CDR2, and a VH CDR3, respectively, of a VH having an amino acid sequence of SEQ ID NO:3941; and (ii) a VL comprising a VL CDR1, a VL CDR2, and a VL CDR3 having an amino acid sequence of a VL CDR1, a VL CDR2, and a VL CDR3, respectively, of a VL having an amino acid sequence of SEQ ID NO:3942. In one embodiment, the TRDV2 antibody comprises: (i) a VH comprising a VH CDR1, a VH CDR2, and a VH CDR3 having an amino acid sequence of a VH CDR1, a VH CDR2, and a VH CDR3, respectively, of a VH having an amino acid sequence of SEQ ID NO:3975; and (ii) a VL comprising a VL CDR1, a VL CDR2, and a VL CDR3 having an amino acid sequence of a VL CDR1, a VL CDR2, and a VL CDR3, respectively, of a VL having an amino acid sequence of SEQ ID NO:3976. In one embodiment, the TRDV2 antibody comprises: (i) a VH comprising a VH CDR1, a VH CDR2, and a VH CDR3 having an amino acid sequence of a VH CDR1, a VH CDR2, and a VH CDR3, respectively, of a VH having an amino acid sequence of SEQ ID NO:4009; and (ii) a VL comprising a VL CDR1, a VL CDR2, and a VL CDR3 having an amino acid sequence of a VL CDR1, a VL CDR2, and a VL CDR3, respectively, of a VL having an amino acid sequence of SEQ ID NO:4010. In one embodiment, the TRDV2 antibody comprises: (i) a VH comprising a VH CDR1, a VH CDR2, and a VH CDR3 having an amino acid sequence of a VH CDR1, a VH CDR2, and a VH CDR3, respectively, of a VH having an amino acid sequence of SEQ ID NO:4043; and (ii) a VL comprising a VL CDR1, a VL CDR2, and a VL CDR3 having an amino acid sequence of a VL CDR1, a VL CDR2, and a VL CDR3, respectively, of a VL having an amino acid sequence of SEQ ID NO:4044. In one embodiment, the TRDV2 antibody comprises: (i) a VH comprising a VH CDR1, a VH CDR2, and a VH CDR3 having an amino acid sequence of a VH CDR1, a VH CDR2, and a VH CDR3, respectively, of a VH having an amino acid sequence of SEQ ID NO:4077; and (ii) a VL comprising a VL CDR1, a VL CDR2, and a VL CDR3 having an amino acid sequence of a VL CDR1, a VL CDR2, and a VL CDR3, respectively, of a VL having an amino acid sequence of SEQ ID NO:4078. In one embodiment, the TRDV2 antibody comprises: (i) a VH comprising a VH CDR1, a VH CDR2, and a VH CDR3 having an amino acid sequence of a VH CDR1, a VH CDR2, and a VH CDR3, respectively, of a VH having an amino acid sequence of SEQ ID NO:4111; and (ii) a VL comprising a VL CDR1, a VL CDR2, and a VL CDR3 having an amino acid sequence of a VL CDR1, a VL CDR2, and a VL CDR3, respectively, of a VL having an amino acid sequence of SEQ ID NO:4112.

[0014] In some embodiments, the VH CDR1, VH CDR2, VH CDR3, VL CDR1, VL CDR2, and VL CDR3 amino acid sequences of the TRDV2 antibody are according to the Kabat numbering system. In some embodiments, the VH CDR1, VH CDR2, VH CDR3, VL CDR1, VL CDR2, and VL CDR3 amino acid sequences of the TRDV2 antibody are according to the Chothia numbering system. In some embodiments, the VH CDR1, VH CDR2, VH CDR3, VL CDR1, VL CDR2, and VL CDR3 amino acid sequences of the TRDV2 antibody are according to the AbM numbering system. In some embodiments, the VH CDR1, VH CDR2, VH CDR3, VL CDR1, VL CDR2, and VL CDR3 amino acid sequences of the TRDV2 antibody are according to the Contact numbering system. In some embodiments, the VH CDR1, VH CDR2, VH CDR3, VL CDR1, VL CDR2, and VL CDR3 amino acid sequences of the TRDV2 antibody are according to the IMGT numbering system.

[0015] In some embodiments, the antibody binds a TRDV2 antigen. In some embodiments, antibody binds a TRDV2 epitope. In some embodiments, the antibody specifically binds to TRDV2. In some embodiments, the VH CDR1, VH CDR2, VH CDR3, VL CDR1, VL CDR2 and VL CDR3 form a binding site for an antigen of the TRDV2. In some embodiments, the VH CDR1, VH CDR2, VH CDR3, VL CDR1, VL CDR2 and VL CDR3 form a binding site for an epitope of the TRDV2. In some embodiments, the TRDV2 is present on the surface of a T cell.

[0016] In some embodiments, the TRDV2 antibody is a humanized antibody. In some embodiments, the antibody is an IgG antibody. In some embodiments, the TRDV2 antibody is an IgG1 antibody. In some embodiments, the TRDV2 antibody is an IgG2 antibody. In some embodiments, the TRDV2 antibody is an IgG3 antibody. In some embodiments, the TRDV2 antibody is an IgG4 antibody. In some embodiments, the TRDV2 antibody comprises a kappa light chain. In some embodiments, the TRDV2 the antibody comprises a lambda light chain. In some embodiments, the TRDV2 antibody is a monoclonal antibody. In some embodiments, the TRDV2 antibody is multivalent. In some embodiments, the TRDV2 antibody is capable of binding at least three antigens. In some embodiments, the TRDV2 antibody is capable of binding at least five antigens. In some embodiments, the TRDV2 antibody is a multispecific antibody. In some embodiments, the TRDV2 antibody is a bispecific antibody.

[0017] In another aspect, provided is a nucleic acid sequence encoding a TRDV2 antibody provided herein. Also provided is a vector comprising a nucleic acid sequence encoding a TRDV2 antibody provided herein. Also provided is a host cell comprising a vector comprising a nucleic acid sequence encoding a TRDV2 antibody provided herein. Also provided is a kit comprising vector comprising a nucleic acid sequence encoding a TRDV2 antibody provided herein, and packaging for the same.

[0018] In another aspect, provided is a kit comprising a TRDV2 antibody provided herein, and packaging for the same.

[0019] In another aspect, provided is a pharmaceutical composition comprising a TRDV2 antibody provided herein, and a pharmaceutically acceptable carrier.

[0020] In another aspect, provided is a method of producing a pharmaceutical composition comprising a TRDV2 antibody provided herein, comprising combining the TRDV2 antibody with a pharmaceutically acceptable carrier to obtain the pharmaceutical composition.

[0021] In another aspect, provided is a method of activating a T cell expressing TRDV2, comprising contacting the T cell with a TRDV2 antibody provided herein. In certain embodiments, the contacting results in an increase in CD69, CD25, and/or Granzyme B expression, as compared to a control T cell expressing TRDV2.

[0022] In another aspect, provided herein is an antibody that binds TRGDC. In one embodiment, the TRGDC antibody comprises: In one embodiment, the TRGDC antibody comprises: (i) a VH comprising a VH CDR1, a VH CDR2, and a VH CDR3 having an amino acid sequence of a VH CDR1, a VH CDR2, and a VH CDR3, respectively, of a VH having an amino acid sequence of SEQ ID NO:4145; and (ii) a VL comprising a VL CDR1, a VL CDR2, and a VL CDR3 having an amino acid sequence of a VL CDR1, a VL CDR2, and a VL CDR3, respectively, of a VL having an amino acid sequence of SEQ ID NO:4146. In one embodiment, the TRGDC antibody comprises: (i) a VH comprising a VH CDR1, a VH CDR2, and a VH CDR3 having an amino acid sequence of a VH CDR1, a VH CDR2, and a VH CDR3, respectively, of a VH having an amino acid sequence of SEQ ID NO:4179; and (ii) a VL comprising a VL CDR1, a VL CDR2, and a VL CDR3 having an amino acid sequence of a VL CDR1, a VL CDR2, and a VL CDR3, respectively, of a VL having an amino acid sequence of SEQ ID NO:4180. In one embodiment, the TRGDC antibody comprises: (i) a VH comprising a VH CDR1, a VH CDR2, and a VH CDR3 having an amino acid sequence of a VH CDR1, a VH CDR2, and a VH CDR3, respectively, of a VH having an amino acid sequence of SEQ ID NO:4213; and (ii) a VL comprising a VL CDR1, a VL CDR2, and a VL CDR3 having an amino acid sequence of a VL CDR1, a VL CDR2, and a VL CDR3, respectively, of a VL having an amino acid sequence of SEQ ID NO:4214. In one embodiment, the TRGDC antibody comprises: (i) a VH comprising a VH CDR1, a VH CDR2, and a VH CDR3 having an amino acid sequence of a VH CDR1, a VH CDR2, and a VH CDR3, respectively, of a VH having an amino acid sequence of SEQ ID NO:4247; and (ii) a VL comprising a VL CDR1, a VL CDR2, and a VL CDR3 having an amino acid sequence of a VL CDR1, a VL CDR2, and a VL CDR3, respectively, of a VL having an amino acid sequence of SEQ ID NO:4248. In one embodiment, the TRGDC antibody comprises: (i) a VH comprising a VH CDR1, a VH CDR2, and a VH CDR3 having an amino acid sequence of a VH CDR1, a VH CDR2, and a VH CDR3, respectively, of a VH having an amino acid sequence of SEQ ID NO:4281; and (ii) a VL comprising a VL CDR1, a VL CDR2, and a VL CDR3 having an amino acid sequence of a VL CDR1, a VL CDR2, and a VL CDR3, respectively, of a VL having an amino acid sequence of SEQ ID NO:4282. In one embodiment, the TRGDC antibody comprises: (i) a VH comprising a VH CDR1, a VH CDR2, and a VH CDR3 having an amino acid sequence of a VH CDR1, a VH CDR2, and a VH CDR3, respectively, of a VH having an amino acid sequence of SEQ ID NO:4315; and (ii) a VL comprising a VL CDR1, a VL CDR2, and a VL CDR3 having an amino acid sequence of a VL CDR1, a VL CDR2, and a VL CDR3, respectively, of a VL having an amino acid sequence of SEQ ID NO:4316. In one embodiment, the TRGDC antibody comprises: (i) a VH comprising a VH CDR1, a VH CDR2, and a VH CDR3 having an amino acid sequence of a VH CDR1, a VH CDR2, and a VH CDR3, respectively, of a VH having an amino acid sequence of SEQ ID NO:4349; and (ii) a VL comprising a VL CDR1, a VL CDR2, and a VL CDR3 having an amino acid sequence of a VL CDR1, a VL CDR2, and a VL CDR3, respectively, of a VL having an amino acid sequence of SEQ ID NO:4350. In one embodiment, the TRGDC antibody comprises: (i) a VH comprising a VH CDR1, a VH CDR2, and a VH CDR3 having an amino acid sequence of a VH CDR1, a VH CDR2, and a VH CDR3, respectively, of a VH having an amino acid sequence of SEQ ID NO:4383; and (ii) a VL comprising a VL CDR1, a VL CDR2, and a VL CDR3 having an amino acid sequence of a VL CDR1, a VL CDR2, and a VL CDR3, respectively, of a VL having an amino acid sequence of SEQ ID NO:4384. In one embodiment, the TRGDC antibody comprises: (i) a VH comprising a VH CDR1, a VH CDR2, and a VH CDR3 having an amino acid sequence of a VH CDR1, a VH CDR2, and a VH CDR3, respectively, of a VH having an amino acid sequence of SEQ ID NO:4417; and (ii) a VL comprising a VL CDR1, a VL CDR2, and a VL CDR3 having an amino acid sequence of a VL CDR1, a VL CDR2, and a VL CDR3, respectively, of a VL having an amino acid sequence of SEQ ID NO:4418. In one embodiment, the TRGDC antibody comprises: (i) a VH comprising a VH CDR1, a VH CDR2, and a VH CDR3 having an amino acid sequence of a VH CDR1, a VH CDR2, and a VH CDR3, respectively, of a VH having an amino acid sequence of SEQ ID NO:4451; and (ii) a VL comprising a VL CDR1, a VL CDR2, and a VL CDR3 having an amino acid sequence of a VL CDR1, a VL CDR2, and a VL CDR3, respectively, of a VL having an amino acid sequence of SEQ ID NO:4452. In one embodiment, the TRGDC antibody comprises: (i) a VH comprising a VH CDR1, a VH CDR2, and a VH CDR3 having an amino acid sequence of a VH CDR1, a VH CDR2, and a VH CDR3, respectively, of a VH having an amino acid sequence of SEQ ID NO:4485; and (ii) a VL comprising a VL CDR1, a VL CDR2, and a VL CDR3 having an amino acid sequence of a VL CDR1, a VL CDR2, and a VL CDR3, respectively, of a VL having an amino acid sequence of SEQ ID NO:4486. In one embodiment, the TRGDC antibody comprises: (i) a VH comprising a VH CDR1, a VH CDR2, and a VH CDR3 having an amino acid sequence of a VH CDR1, a VH CDR2, and a VH CDR3, respectively, of a VH having an amino acid sequence of SEQ ID NO:4519; and (ii) a VL comprising a VL CDR1, a VL CDR2, and a VL CDR3 having an amino acid sequence of a VL CDR1, a VL CDR2, and a VL CDR3, respectively, of a VL having an amino acid sequence of SEQ ID NO:4520. In one embodiment, the TRGDC antibody comprises: (i) a VH comprising a VH CDR1, a VH CDR2, and a VH CDR3 having an amino acid sequence of a VH CDR1, a VH CDR2, and a VH CDR3, respectively, of a VH having an amino acid sequence of SEQ ID NO:4553; and (ii) a VL comprising a VL CDR1, a VL CDR2, and a VL CDR3 having an amino acid sequence of a VL CDR1, a VL CDR2, and a VL CDR3, respectively, of a VL having an amino acid sequence of SEQ ID NO:4554. In one embodiment, the TRGDC antibody comprises: (i) a VH comprising a VH CDR1, a VH CDR2, and a VH CDR3 having an amino acid sequence of a VH CDR1, a VH CDR2, and a VH CDR3, respectively, of a VH having an amino acid sequence of SEQ ID NO:4587; and (ii) a VL comprising a VL CDR1, a VL CDR2, and a VL CDR3 having an amino acid sequence of a VL CDR1, a VL CDR2, and a VL CDR3, respectively, of a VL having an amino acid sequence of SEQ ID NO:4588. In one embodiment, the TRGDC antibody comprises: (i) a VH comprising a VH CDR1, a VH CDR2, and a VH CDR3 having an amino acid sequence of a VH CDR1, a VH CDR2, and a VH CDR3, respectively, of a VH having an amino acid sequence of SEQ ID NO:4621; and (ii) a VL comprising a VL CDR1, a VL CDR2, and a VL CDR3 having an amino acid sequence of a VL CDR1, a VL CDR2, and a VL CDR3, respectively, of a VL having an amino acid sequence of SEQ ID NO:4622. In one embodiment, the TRGDC antibody comprises: (i) a VH comprising a VH CDR1, a VH CDR2, and a VH CDR3 having an amino acid sequence of a VH CDR1, a VH CDR2, and a VH CDR3, respectively, of a VH having an amino acid sequence of SEQ ID NO:4655; and (ii) a VL comprising a VL CDR1, a VL CDR2, and a VL CDR3 having an amino acid sequence of a VL CDR1, a VL CDR2, and a VL CDR3, respectively, of a VL having an amino acid sequence of SEQ ID NO:4656.

[0023] In some embodiments, the VH CDR1, VH CDR2, VH CDR3, VL CDR1, VL CDR2, and VL CDR3 amino acid sequences of the TRGDC antibody are according to the Kabat numbering system. In some embodiments, the VH CDR1, VH CDR2, VH CDR3, VL CDR1, VL CDR2, and VL CDR3 amino acid sequences of the TRGDC antibody are according to the Chothia numbering system. In some embodiments, the VH CDR1, VH CDR2, VH CDR3, VL CDR1, VL CDR2, and VL CDR3 amino acid sequences of the TRGDC antibody are according to the AbM numbering system. In some embodiments, the VH CDR1, VH CDR2, VH CDR3, VL CDR1, VL CDR2, and VL CDR3 amino acid sequences of the TRGDC antibody are according to the Contact numbering system. In some embodiments, the VH CDR1, VH CDR2, VH CDR3, VL CDR1, VL CDR2, and VL CDR3 amino acid sequences of the TRGDC antibody are according to the IMGT numbering system.

[0024] In some embodiments, the antibody binds a TRGDC antigen. In some embodiments, antibody binds a TRGDC epitope. In some embodiments, the antibody specifically binds to TRGDC. In some embodiments, the VH CDR1, VH CDR2, VH CDR3, VL CDR1, VL CDR2 and VL CDR3 form a binding site for an antigen of the TRGDC. In some embodiments, the VH CDR1, VH CDR2, VH CDR3, VL CDR1, VL CDR2 and VL CDR3 form a binding site for an epitope of the TRGDC. In some embodiments, the TRGDC is present on the surface of a T cell.

[0025] In some embodiments, the TRGDC antibody is a humanized antibody. In some embodiments, the antibody is an IgG antibody. In some embodiments, the TRGDC antibody is an IgG1 antibody. In some embodiments, the TRGDC antibody is an IgG2 antibody. In some embodiments, the TRGDC antibody is an IgG3 antibody. In some embodiments, the TRGDC antibody is an IgG4 antibody. In some embodiments, the TRGDC antibody comprises a kappa light chain. In some embodiments, the TRGDC the antibody comprises a lambda light chain. In some embodiments, the TRGDC antibody is a monoclonal antibody. In some embodiments, the TRGDC antibody is multivalent. In some embodiments, the TRGDC antibody is capable of binding at least three antigens. In some embodiments, the TRGDC antibody is capable of binding at least five antigens. In some embodiments, the TRGDC antibody is a multispecific antibody. In some embodiments, the TRGDC antibody is a bispecific antibody.

[0026] In another aspect, provided is a nucleic acid sequence encoding a TRGDC antibody provided herein. Also provided is a vector comprising a nucleic acid sequence encoding a TRGDC antibody provided herein. Also provided is a host cell comprising a vector comprising a nucleic acid sequence encoding a TRGDC antibody provided herein. Also provided is a kit comprising vector comprising a nucleic acid sequence encoding a TRGDC antibody provided herein, and packaging for the same.

[0027] In another aspect, provided is a kit comprising a TRGDC antibody provided herein, and packaging for the same.

[0028] In another aspect, provided is a pharmaceutical composition comprising a TRGDC antibody provided herein, and a pharmaceutically acceptable carrier.

[0029] In another aspect, provided is a method of producing a pharmaceutical composition comprising a TRGDC antibody provided herein, comprising combining the TRGDC antibody with a pharmaceutically acceptable carrier to obtain the pharmaceutical composition.

[0030] In another aspect, provided is a method of activating a T cell expressing TRGDC, comprising contacting the T cell with a TRGDC antibody provided herein. In certain embodiments, the contacting results in an increase in CD69, CD25, and/or Granzyme B expression, as compared to a control T cell expressing TRGDC.

### DETAILED DESCRIPTION

[0031] Various publications, articles and patents are cited or described in the background and throughout the specification; each of these references is herein incorporated by reference in its entirety. Discussion of documents, acts, materials, devices, articles or the like which has been included in the present specification is for the purpose of providing context for the invention. Such discussion is not an admission that any or all of these matters form part of the prior art with respect to any inventions disclosed or claimed.

[0032] Unless defined otherwise, all technical and scientific terms used herein have the same meaning as commonly understood to one of ordinary skill in the art to which this invention pertains. Otherwise, certain terms used herein have the meanings as set forth in the specification.

[0033] It must be noted that as used herein and in the appended claims, the singular forms “a,” “an,” and “the” include plural reference unless the context clearly dictates otherwise.

[0034] Unless otherwise stated, any numerical values, such as a concentration or a concentration range described herein, are to be understood as being modified in all instances by the term “about.” Thus, a numerical value typically includes ±10% of the recited value. For example, a concentration of 1 mg/mL includes 0.9 mg/mL to 1.1 mg/mL. Likewise, a concentration range of 1% to 10% (w/v) includes 0.9% (w/v) to 11% (w/v). As used herein, the use of a numerical range expressly includes all possible subranges, all individual numerical values within that range, including integers within such ranges and fractions of the values unless the context clearly indicates otherwise.

[0035] Unless otherwise indicated, the term “at least” preceding a series of elements is to be understood to refer to every element in the series.

[0036] Those skilled in the art will recognize or be able to ascertain using no more than routine experimentation, many equivalents to the specific embodiments described herein. Such equivalents are intended to been compassed by the invention.

[0037] As used herein, the terms “comprises,” “comprising,” “includes,” “including,” “has,” “having,” “contains” or “containing,” or any other variation thereof, will be understood to imply the inclusion of a stated integer or group of integers but not the exclusion of any other integer or group of integers and are intended to be non-exclusive or open-ended. For example, a composition, a mixture, a process, a method, an article, or an apparatus that comprises a list of elements is not necessarily limited to only those elements but can include other elements not expressly listed or inherent to such composition, mixture, process, method, article, or apparatus. Further, unless expressly stated to the contrary, “or” refers to an inclusive or and not to an exclusive or. For example, a condition A or B is satisfied by any one of the following: A is true (or present) and B is false (or not present), A is false (or not present) and B is true (or present), and both A and B are true (or present).

[0038] As used herein, the conjunctive term “and/or” between multiple recited elements is understood as encompassing both individual and combined options. For instance, where two elements are conjoined by “and/or,” a first option refers to the applicability of the first element without the second. A second option refers to the applicability of the second element without the first. A third option refers to the applicability of the first and second elements together. Any one of these options is understood to fall within the meaning, and therefore satisfy the requirement of the term “and/or” as used herein. Concurrent applicability of more than one of the options is also understood to fall within the meaning, and therefore satisfy the requirement of the term “and/or.”

[0039] As used herein, the term “consists of,” or variations such as “consist of” or “consisting of,” as used throughout the specification and claims, indicate the inclusion of any recited integer or group of integers, but that no additional integer or group of integers can be added to the specified method, structure, or composition.

[0040] As used herein, the term “consists essentially of,” or variations such as “consist essentially of” or “consisting essentially of,” as used throughout the specification and claims, indicate the inclusion of any recited integer or group of integers, and the optional inclusion of any recited integer or group of integers that do not materially change the basic or novel properties of the specified method, structure or composition. See M.P.E.P. § 2111.03.

[0041] As used herein, “subject” means any animal, preferably a mammal, most preferably a human. The term “mammal” as used herein, encompasses any mammal. Examples of mammals include, but are not limited to, cows, horses, sheep, pigs, cats, dogs, mice, rats, rabbits, guinea pigs, monkeys, humans, etc. In a specific embodiments, the subject is a human.

[0042] It should also be understood that the terms “about,” “approximately,” “generally,” “substantially,” and like terms, used herein when referring to a dimension or characteristic of a component of embodiments provided herein, indicate that the described dimension/characteristic is not a strict boundary or parameter and does not exclude minor variations therefrom that are functionally the same or similar, as would be understood by one having ordinary skill in the art. At a minimum, such references that include a numerical parameter would include variations that, using mathematical and industrial principles accepted in the art (e.g., rounding, measurement or other systematic errors, manufacturing tolerances, etc.), would not vary the least significant digit.

[0043] The terms “identical” or percent “identity,” in the context of two or more nucleic acids or polypeptide sequences (e.g., TRGV9 antibody and polynucleotides that encode them, TRDV2 antibody and polynucleotides that encode them, or TRGDC antibody and polynucleotides that encode them), refer to two or more sequences or subsequences that are the same or have a specified percentage of amino acid residues or nucleotides that are the same, when compared and aligned for maximum correspondence, as measured using one of the following sequence comparison algorithms or by visual inspection.

[0044] For sequence comparison, typically one sequence acts as a reference sequence, to which test sequences are compared. When using a sequence comparison algorithm, test and reference sequences are input into a computer, subsequence coordinates are designated, if necessary, and sequence algorithm program parameters are designated. The sequence comparison algorithm then calculates the percent sequence identity for the test sequence(s) relative to the reference sequence, based on the designated program parameters.

[0045] Optimal alignment of sequences for comparison can be conducted, e.g., by the local homology algorithm of Smith & Waterman, Adv. Appl. Math. 2:482 (1981), by the homology alignment algorithm of Needleman & Wunsch, J. Mol. Biol. 48:443 (1970), by the search for similarity method of Pearson & Lipman, Proc. Nat'l. Acad. Sci. USA 85:2444 (1988), by computerized implementations of these algorithms (GAP, BESTFIT, FASTA, and TFASTA in the Wisconsin Genetics Software Package, Genetics Computer Group, 575 Science Dr., Madison, WI), or by visual inspection (see generally, Current Protocols in Molecular Biology, F. M. Ausubel et al., eds., Current Protocols, a joint venture between Greene Publishing Associates, Inc. and John Wiley & Sons, Inc., (1995 Supplement) (Ausubel)).

[0046] Examples of algorithms that are suitable for determining percent sequence identity and sequence similarity are the BLAST and BLAST 2.0 algorithms, which are described in Altschul et al. (1990) J. Mol. Biol. 215: 403-410 and Altschul et al. (1997) Nucleic Acids Res. 25: 3389-3402, respectively. Software for performing BLAST analyses is publicly available through the National Center for Biotechnology Information. This algorithm involves first identifying high scoring sequence pairs (HSPs) by identifying short words of length W in the query sequence, which either match or satisfy some positive-valued threshold score T when aligned with a word of the same length in a database sequence. T is referred to as the neighborhood word score threshold (Altschul et al., supra). These initial neighborhood word hits act as seeds for initiating searches to find longer HSPs containing them. The word hits are then extended in both directions along each sequence for as far as the cumulative alignment score can be increased.

[0047] Cumulative scores are calculated using, for nucleotide sequences, the parameters M (reward score for a pair of matching residues; always >0) and N (penalty score for mismatching residues; always <0). For amino acid sequences, a scoring matrix is used to calculate the cumulative score. Extension of the word hits in each direction are halted when: the cumulative alignment score falls off by the quantity X from its maximum achieved value; the cumulative score goes to zero or below, due to the accumulation of one or more negative-scoring residue alignments; or the end of either sequence is reached. The BLAST algorithm parameters W, T, and X determine the sensitivity and speed of the alignment. The BLASTN program (for nucleotide sequences) uses as defaults a word length (W) of 11, an expectation (E) of 10, M=5, N=−4, and a comparison of both strands. For amino acid sequences, the BLASTP program uses as defaults a word length (W) of 3, an expectation (E) of 10, and the BLOSUM62 scoring matrix (see Henikoff & Henikoff, Proc. Natl. Acad. Sci. USA 89:10915 (1989)).

[0048] In addition to calculating percent sequence identity, the BLAST algorithm also performs a statistical analysis of the similarity between two sequences (see, e.g., Karlin & Altschul, Proc. Nat'l. Acad. Sci. USA 90:5873-5787 (1993)). One measure of similarity provided by the BLAST algorithm is the smallest sum probability (P(N)), which provides an indication of the probability by which a match between two nucleotide or amino acid sequences would occur by chance. For example, a nucleic acid is considered similar to a reference sequence if the smallest sum probability in a comparison of the test nucleic acid to the reference nucleic acid is less than about 0.1, more preferably less than about 0.01, and most preferably less than about 0.001.

[0049] A further indication that two nucleic acid sequences or polypeptides are substantially identical is that the polypeptide encoded by the first nucleic acid is immunologically cross reactive with the polypeptide encoded by the second nucleic acid, as described below. Thus, a polypeptide is typically substantially identical to a second polypeptide, for example, where the two peptides differ only by conservative substitutions. Another indication that two nucleic acid sequences are substantially identical is that the two molecules hybridize to each other under stringent conditions.

[0050] As used herein, the term “polynucleotide,” synonymously referred to as “nucleic acid molecule,” “nucleotides” or “nucleic acids,” refers to any polyribonucleotide or polydeoxyribonucleotide, which can be unmodified RNA or DNA or modified RNA or DNA. “Polynucleotides” include, without limitation single- and double-stranded DNA, DNA that is a mixture of single- and double-stranded regions, single- and double-stranded RNA, and RNA that is mixture of single- and double-stranded regions, hybrid molecules comprising DNA and RNA that can be single-stranded or, more typically, double-stranded or a mixture of single- and double-stranded regions. In addition, “polynucleotide” refers to triple-stranded regions comprising RNA or DNA or both RNA and DNA. The term polynucleotide also includes DNAs or RNAs containing one or more modified bases and DNAs or RNAs with backbones modified for stability or for other reasons. “Modified” bases include, for example, tritylated bases and unusual bases such as inosine. A variety of modifications can be made to DNA and RNA; thus, “polynucleotide” embraces chemically, enzymatically or metabolically modified forms of polynucleotides as typically found in nature, as well as the chemical forms of DNA and RNA characteristic of viruses and cells. “Polynucleotide” also embraces relatively short nucleic acid chains, often referred to as oligonucleotides.

[0051] As used herein, the term “vector” is a replicon in which another nucleic acid segment can be operably inserted so as to bring about the replication or expression of the segment.

[0052] As used herein, the term “host cell” refers to a cell comprising a nucleic acid molecule provided herein. The “host cell” can be any type of cell, e.g., a primary cell, a cell in culture, or a cell from a cell line. In one embodiment, a “host cell” is a cell transfected with a nucleic acid molecule provided herein. In another embodiment, a “host cell” is a progeny or potential progeny of such a transfected cell. A progeny of a cell may or may not be identical to the parent cell, e.g., due to mutations or environmental influences that can occur in succeeding generations or integration of the nucleic acid molecule into the host cell genome.

[0053] The term “expression” as used herein, refers to the biosynthesis of a gene product. The term encompasses the transcription of a gene into RNA. The term also encompasses translation of RNA into one or more polypeptides, and further encompasses all naturally occurring post-transcriptional and post-translational modifications. The expressed antibody can be within the cytoplasm of a host cell, into the extracellular milieu such as the growth medium of a cell culture or anchored to the cell membrane.

[0054] As used herein, the terms “peptide,” “polypeptide,” or “protein” can refer to a molecule comprised of amino acids and can be recognized as a protein by those of skill in the art. The conventional one-letter or three-letter code for amino acid residues is used herein. The terms “peptide,” “polypeptide,” and “protein” can be used interchangeably herein to refer to polymers of amino acids of any length. The polymer can be linear or branched, it can comprise modified amino acids, and it can be interrupted by non-amino acids. The terms also encompass an amino acid polymer that has been modified naturally or by intervention; for example, disulfide bond formation, glycosylation, lipidation, acetylation, phosphorylation, or any other manipulation or modification, such as conjugation with a labeling component. Also included within the definition are, for example, polypeptides containing one or more analogs of an amino acid (including, for example, unnatural amino acids, etc.), as well as other modifications known in the art.

[0055] The peptide sequences described herein are written according to the usual convention whereby the N-terminal region of the peptide is on the left and the C-terminal region is on the right. Although isomeric forms of the amino acids are known, it is the L-form of the amino acid that is represented unless otherwise expressly indicated.

### Antibodies

[0056] Provided herein are TRGV9 antibodies or antigen-binding fragments thereof, nucleic acids and expression vectors encoding the antibodies, recombinant cells containing the vectors, and compositions comprising the antibodies. The antibodies disclosed herein possess one or more desirable functional properties, including but not limited to high-affinity binding to TRGV9 or high specificity to TRGV9. Also provided herein are TRDV2 antibodies or antigen-binding fragments thereof, nucleic acids and expression vectors encoding the antibodies, recombinant cells containing the vectors, and compositions comprising the antibodies. The antibodies disclosed herein possess one or more desirable functional properties, including but not limited to high-affinity binding to TRDV2 or high specificity to TRDV2. Also provided herein are antibodies or antigen-binding fragments thereof that bind TRGDC, nucleic acids and expression vectors encoding the antibodies, recombinant cells containing the vectors, and compositions comprising the antibodies. The antibodies disclosed herein possess one or more desirable functional properties, including but not limited to high-affinity binding to TRGDC or high specificity to TRGDC. Methods of making the antibodies, and methods of using the antibodies to treat diseases are also provided. In certain embodiments, the antibodies disclosed herein possess the ability to treat or prevent a disease or disorder when administered to a subject alone or in combination with other therapies.

[0057] As used herein, the term “antibody” is used in a broad sense and includes immunoglobulin or antibody molecules including human, humanized, composite and chimeric antibodies and antibody fragments that are monoclonal or polyclonal. In general, antibodies are proteins or peptide chains that exhibit binding specificity to a specific antigen. Antibody structures are well known. Immunoglobulins can be assigned to five major classes (i.e., IgA, IgD, IgE, IgG and IgM), depending on the heavy chain constant domain amino acid sequence. IgA and IgG are further sub-classified as the isotypes IgA1, IgA2, IgG1, IgG2, IgG3 and IgG4. Accordingly, the antibodies provided herein can be of any of the five major classes or corresponding sub-classes. In specific embodiments, the antibodies provided herein are IgG1, IgG2, IgG3 or IgG4. Antibody light chains of vertebrate species can be assigned to one of two clearly distinct types, namely kappa and lambda, based on the amino acid sequences of their constant domains. Accordingly, the antibodies provided herein can, in certain embodiments, contain a kappa light chain constant domain. The antibodies provided herein can, in certain embodiments, also contain a lambda light chain constant domain. According to particular embodiments, the antibodies provided herein include heavy and/or light chain constant regions from rat or human antibodies. In specific embodiments, the contant region is a human constant region.

[0058] In addition to the heavy and light constant domains, antibodies contain an antigen-binding region that is made up of a light chain variable region (VL) and a heavy chain variable region (VH), each of which contains three domains (i.e., complementarity determining regions 1 (CDR1), CDR2 and CDR3. A “CDR” refers to one of three hypervariable regions (HCDR1, HCDR2 or HCDR3) within the non-framework region of the immunoglobulin (Ig or antibody) VH β-sheet framework, or one of three hypervariable regions (LCDR1, LCDR2 or LCDR3) within the non-framework region of the antibody VL β-sheet framework. Accordingly, CDRs are variable region sequences interspersed within the framework region sequences. CDR regions are well known to those skilled in the art and have been defined by, for example, Kabat as the regions of most hypervariability within the antibody variable (V) domains (Kabat et al., J. Biol. Chem. 252:6609-6616 (1977); Kabat, Adv. Prot. Chem. 32:1-75 (1978)). CDR region sequences also have been defined structurally by Chothia as those residues that are not part of the conserved β-sheet framework, and thus are able to adapt different conformations (Chothia and Lesk, J. Mol. Biol. 196:901-917 (1987)). Both terminologies are well recognized in the art. CDR region sequences have also been defined by AbM, Contact and IMGT. Exemplary CDR region sequences are illustrated herein, for example, in the tables provided in the Examples below. The positions of CDRs within a canonical antibody variable region have been determined by comparison of numerous structures (Al-Lazikani et al., J. Mol. Biol. 273:927-948 (1997); Morea et al., Methods 20:267-279 (2000)). Because the number of residues within a hypervariable region varies in different antibodies, additional residues relative to the canonical positions are conventionally numbered with a, b, c and so forth next to the residue number in the canonical variable region numbering scheme (Al-Lazikani et al., supra (1997)). Such nomenclature is similarly well known to those skilled in the art.

[0059] The light chain variable region CDR1 domain is interchangeably referred to herein as LCDR1 or VL CDR1. The light chain variable region CDR2 domain is interchangeably referred to herein as LCDR2 or VL CDR2. The light chain variable region CDR3 domain is interchangeably referred to herein as LCDR3 or VL CDR3. The heavy chain variable region CDR1 domain is interchangeably referred to herein as HCDR1 or VH CDR1. The heavy chain variable region CDR2 domain is interchangeably referred to herein as HCDR2 or VH CDR2. The heavy chain variable region CDR1 domain is interchangeably referred to herein as HCDR3 or VH CDR3.

[0060] The term “hypervariable region”, such as a VH or VL, when used herein refers to the regions of an antibody variable region that are hypervariable in sequence and/or form structurally defined loops. Generally, antibodies comprise six hypervariable regions; three in the VH (HCDR1, HCDR2, HCDR3), and three in the VL (LCDR1, LCDR2, LCDR3). A number of hypervariable region delineations are in use and are encompassed herein. The “Kabat” CDRs are based on sequence variability and are the most commonly used (see, e.g., Kabat et al., Sequences of Proteins of Immunological Interest, 5th Ed. Public Health Service, National Institutes of Health, Bethesda, MD. (1991)). “Chothia” refers instead to the location of the structural loops (see, e.g., Chothia and Lesk, J. Mol. Biol. 196:901-917 (1987)). The end of the Chothia CDR-HCDR1 loop when numbered using the Kabat numbering convention varies between H32 and H34 depending on the length of the loop (this is because the Kabat numbering scheme places the insertions at H35A and H35B; if neither 35A nor 35B is present, the loop ends at 32; if only 35A is present, the loop ends at 33; if both 35A and 35B are present, the loop ends at 34). The “AbM” hypervariable regions represent a compromise between the Kabat CDRs and Chothia structural loops, and are used by Oxford Molecular's AbM antibody modeling software (see, e.g., Martin, in Antibody Engineering, Vol. 2, Chapter 3, Springer Verlag). “Contact” hypervariable regions are based on an analysis of the available complex crystal structures.

[0061] Recently, a universal numbering system has been developed and widely adopted, ImMunoGeneTics (IMGT) Information System® (Lafranc et al., Dev. Comp. Immunol. 27(1):55-77 (2003)). IMGT is an integrated information system specializing in immunoglobulins (IG), T cell receptors (TR) and major histocompatibility complex (MHC) of human and other vertebrates. Herein, the CDRs are referred to in terms of both the amino acid sequence and the location within the light or heavy chain. As the “location” of the CDRs within the structure of the immunoglobulin variable domain is conserved between species and present in structures called loops, by using numbering systems that align variable domain sequences according to structural features, CDR and framework residues and are readily identified. This information can be used in grafting and replacement of CDR residues from immunoglobulins of one species into an acceptor framework from, typically, a human antibody. An additional numbering system (AHon) has been developed by Honegger and Plückthun, J. Mol. Biol. 309: 657-670 (2001). Correspondence between the numbering system, including, for example, the Kabat numbering and the IMGT unique numbering system, is well known to one skilled in the art (see, e.g., Kabat, supra; Chothia and Lesk, supra; Martin, supra; Lefranc et al., supra). An Exemplary system, shown herein, combines Kabat and Chothia.

| | Exemplary | IMGT | Kabat | AbM | Chothia | Contact |
|---|---|---|---|---|---|---|
| V_{H} CDR1 | 26-35 | 27-38 | 31-35 | 26-35 | 26-32 | 30-35 |
| V_{H} CDR2 | 50-65 | 56-65 | 50-65 | 50-58 | 53-55 | 47-58 |
| V_{H} CDR3 | 95-102 | 105-117 | 95-102 | 95-102 | 96-101 | 93-101 |
| V_{L} CDR1 | 24-34 | 27-38 | 24-34 | 24-34 | 26-32 | 30-36 |
| V_{L} CDR2 | 50-56 | 56-65 | 50-56 | 50-56 | 50-52 | 46-55 |
| V_{L} CDR3 | 89-97 | 105-117 | 89-97 | 89-97 | 91-96 | 89-96 |

[0062] Hypervariable regions may comprise “extended hypervariable regions” as follows: 24-36 or 24-34 (LCDR1), 46-56 or 50-56 (LCDR2) and 89-97 or 89-96 (LCDR3) in the VL and 26-35 or 26-35A (HCDR1), 50-65 or 49-65 (HCDR2) and 93-102, 94-102, or 95-102 (HCDR3) in the VH. CDR sequences, reflecting each of the above numbering schemes, are provided herein, including in Tables 2-7.

[0063] The term “constant region” or “constant domain” refers to a carboxy terminal portion of the light and heavy chain which is not directly involved in binding of the antibody to antigen but exhibits various effector function, such as interaction with the Fc receptor. The terms refer to the portion of an immunoglobulin molecule having a more conserved amino acid sequence relative to the other portion of the immunoglobulin, the variable region, which contains the antigen binding site. The constant region may contain the CH1, CH2 and CH3 regions of the heavy chain and the CL region of the light chain.

[0064] The term “framework” or “FR” residues are those variable region residues flanking the CDRs. FR residues are present, for example, in chimeric, humanized, human, domain antibodies, diabodies, linear antibodies, and bispecific antibodies. FR residues are those variable domain residues other than the hypervariable region residues or CDR residues.

[0065] As used herein, the term an “isolated antibody” refers to an antibody which is substantially free of other antibodies having different antigenic specificities (e.g., an isolated antibody that specifically binds to TRGV9 is substantially free of antibodies that do not bind to TRGV9, or an isolated antibody that specifically binds to TRDV2 is substantially free of antibodies that do not bind to TRDV2, or an isolated antibody that specifically binds to TRGDC is substantially free of antibodies that do not bind to TRGDC). In addition, an isolated antibody is substantially free of other cellular material and/or chemicals.

[0066] As used herein, the term “monoclonal antibody” refers to an antibody obtained from a population of substantially homogeneous antibodies, i.e., the individual antibodies comprising the population are identical except for possible naturally occurring mutations that can be present in minor amounts. Monoclonal antibodies provided herein can be made by the hybridoma method, phage display technology, single lymphocyte gene cloning technology, or by recombinant DNA methods. For example, the monoclonal antibodies can be produced by a hybridoma which includes a B cell obtained from a transgenic nonhuman animal, such as a transgenic mouse or rat, having a genome comprising a human heavy chain transgene and a light chain transgene.

[0067] As used herein, the term “antigen-binding fragment” refers to an antibody fragment such as, for example, a diabody, a Fab, a Fab′, a F(ab′)2, an Fv fragment, a disulfide stabilized Fv fragment (dsFv), a (dsFv)₂, a bispecific dsFv (dsFv-dsFv′), a disulfide stabilized diabody (ds diabody), a single-chain antibody molecule (scFv), a single domain antibody (sdAb) an scFv dimer (bivalent diabody), a multispecific antibody formed from a portion of an antibody comprising one or more CDRs, a camelized single domain antibody, a nanobody, a domain antibody, a bivalent domain antibody, or any other antibody fragment that binds to an antigen but does not comprise a complete antibody structure. An antigen-binding fragment is capable of binding to the same antigen to which the parent antibody or a parent antibody fragment binds. According to particular embodiments, the antigen-binding fragment comprises a light chain variable region, a light chain constant region, and an Fd segment of the heavy chain. According to other particular embodiments, the antigen-binding fragment comprises Fab and F(ab′).

[0068] As used herein, the term “single-chain antibody” refers to a conventional single-chain antibody in the field, which comprises a heavy chain variable region and a light chain variable region connected by a short peptide of about 15 to about 20 amino acids. As used herein, the term “single domain antibody” refers to a conventional single domain antibody in the field, which comprises a heavy chain variable region and a heavy chain constant region or which comprises only a heavy chain variable region.

[0069] As used herein, the term “human antibody” refers to an antibody produced by a human or an antibody having an amino acid sequence corresponding to an antibody produced by a human made using any technique known in the art. This definition of a human antibody includes intact or full-length antibodies, fragments thereof, and/or antibodies comprising at least one human heavy and/or light chain polypeptide.

[0070] As used herein, the term “humanized antibody” refers to a non-human antibody that is modified to increase the sequence homology to that of a human antibody, such that the antigen-binding properties of the antibody are retained, but its antigenicity in the human body is reduced.

[0071] As used herein, the term “chimeric antibody” refers to an antibody wherein the amino acid sequence of the immunoglobulin molecule is derived from two or more species. The variable region of both the light and heavy chains often corresponds to the variable region of an antibody derived from one species of mammal (e.g., mouse, rat, rabbit, etc.) having the desired specificity, affinity, and capability, while the constant regions correspond to the sequences of an antibody derived from another species of mammal (e.g., human) to avoid eliciting an immune response in that species.

[0072] As used herein, the term “multispecific antibody” refers to an antibody that comprises a plurality of immunoglobulin variable domain sequences, wherein a first immunoglobulin variable domain sequence of the plurality has binding specificity for a first epitope and a second immunoglobulin variable domain sequence of the plurality has binding specificity for a second epitope. In an embodiment, the first and second epitopes do not overlap or do not substantially overlap. In an embodiment, the first and second epitopes are on different antigens, e.g., the different proteins (or different subunits of a multimeric protein). In an embodiment, a multispecific antibody comprises a third, fourth, or fifth immunoglobulin variable domain. In an embodiment, a multispecific antibody is a bispecific antibody molecule, a trispecific antibody molecule, or a tetraspecific antibody molecule.

[0073] As used herein, the term “bispecific antibody” refers to a multispecific antibody that binds no more than two epitopes or two antigens. A bispecific antibody is characterized by a first immunoglobulin variable domain sequence which has binding specificity for a first epitope (e.g., an epitope on a TRGV9 antigen, an epitope on a TRDV2 antigen, or an epitope on TRGDC) and a second immunoglobulin variable domain sequence that has binding specificity for a second epitope. In an embodiment, the first and second epitopes are on different antigens, e.g., the different proteins (or different subunits of a multimeric protein). In an embodiment, a bispecific antibody comprises a heavy chain variable domain sequence and a light chain variable domain sequence which have binding specificity for a first epitope and a heavy chain variable domain sequence and a light chain variable domain sequence which have binding specificity for a second epitope. In an embodiment, a bispecific antibody comprises a half antibody, or fragment thereof, having binding specificity for a first epitope and a half antibody, or fragment thereof, having binding specificity for a second epitope. In an embodiment, a bispecific antibody comprises a scFv, or fragment thereof, having binding specificity for a first epitope, and a scFv, or fragment thereof, having binding specificity for a second epitope. A “trispecific antibody” is a multispecific antibody that binds three distinct antigens, or three distinct epitopes within the same antigen. A “quadraspecific antibody” is a multispecific antibody that binds four distinct antigens, or four distinct epitopes within the same antigen.

[0074] As used herein, the term “TRGV9” refers to a polypeptide capable of forming a T cell receptor when expressed on the surface of γδ T cells. TRGV9-expressing γδ T cells are among the first T cells to develop in the human fetus and are the predominant γδ T cell subset in healthy adult peripheral blood cells. The terms “TRGV9,” “Vγ9,” and “VG9” are used interchangeably herein. The term “TRGV9” includes any TRGV9 variant, isoform, and species homolog, which is naturally expressed by cells (including T cells) or can be expressed on cells transfected with genes or cDNA encoding the polypeptide. In specific embodiments, the TRGV9 is a human TRGV9. An exemplary human TRGV9 amino acid sequence is provided by GenBank Accession Number NG_001336.2.

[0075] As used herein, an antibody that “specifically binds to TRGV9” refers to an antibody that binds to a TRGV9, preferably a human TRGV9, with a KD of 1×10⁻⁷ M or less, such as 1×10⁻⁸ M or less, 5×10⁻⁹ M or less, 1×10⁻⁹ M or less, 5×10⁻¹⁰ M or less, or 1×10⁻¹⁰ M or less.

[0076] As used herein, the term “TRDV2” refers to a polypeptide capable of forming a T cell receptor when expressed on the surface of γδ T cells. TRDV2-expressing γδ T cells are among the first T cells to develop in the human fetus and are the predominant γδ T cell subset in healthy adult peripheral blood cells. The terms “TRDV2,” “Vδ2,” and “VD2” are used interchangeably herein. The term “TRDV2” includes any TRDV2 variant, isoform, and species homolog, which is naturally expressed by cells (including T cells) or can be expressed on cells transfected with genes or cDNA encoding the polypeptide. In specific embodiments, the TRDV2 is a human TRDV2. An exemplary human TRDV2 amino acid sequence is provided by GenBank Accession Number NG_001332.3.

[0077] As used herein, an antibody that “specifically binds to TRDV2” refers to an antibody that binds to a TRDV2, such as a human TRDV2, with a KD of 1×10⁻⁷ M or less, such as 1×10⁻⁸ M or less, 5×10⁻⁹ M or less, 1×10⁻⁹ M or less, 5×10⁻¹⁰ M or less, or 1×10⁻¹¹ M or less.

[0078] As used herein, the term the “TRGDC” refers to a polypeptide capable of forming a T cell receptor when expressed on the surface of γδ T cells. The terms “TRGDC” and “gamma delta constant” are used interchangeably herein. The term “TRGDC” includes any TRGDC variant, isoform, and species homolog, which is naturally expressed by cells (including T cells) or can be expressed on cells transfected with genes or cDNA encoding the polypeptide. In specific embodiments, the TRGDC is a human TRGDC. An exemplary human T cell receptor delta constant (TRDC) amino acid sequence is provided by GenBank Accession Number NG_001332.3, and an exemplary human T cell receptor gamma constant (TRGC) amino acid sequence is provided by GenBank Accession Number NC_000007.14 (TRGC1) or NC_000007.14 (TRGC2).

[0079] As used herein, an antibody that “specifically binds to TRGDC” refers to an antibody that binds to a TRGDC, such as a human TRGDC, with a KD of 1×10⁻⁷ M or less, such as 1×10⁻⁸ M or less, 5×10⁻⁹ M or less, 1×10⁻⁹ M or less, 5×10⁻¹⁰ M or less, or 1×10⁻¹⁰ M or less.

[0080] The term “KD” refers to the dissociation constant, which is obtained from the ratio of Kd to Ka (i.e., Kd/Ka) and is expressed as a molar concentration (M). KD values for antibodies can be determined using methods in the art in view of the present disclosure. For example, the KD of an antibody can be determined by using surface plasmon resonance, such as by using a biosensor system, e.g., a Biacore® system, or by using bio-layer interferometry technology, such as an Octet RED96 system. The smaller the value of the KD of an antibody, the higher affinity that the antibody binds to a target antigen.

[0081] In one aspect, provided herein is an antibody that binds to TRGV9. In some embodiments, provided herein is an antibody that binds to a TRGV9 antigen. In some embodiments, provided herein is an antibody that binds to a TRGV9 epitope.

[0082] In some embodiments, the antibody comprises a heavy chain variable region and a light chain variable region. In a some embodiments, the TRGV9 antibody is not a single domain antibody or nanobody. In some embodiments, the TRGV9 antibody is a humanized antibody. In some embodiments, the TRGV9 antibody is a fully human antibody.

[0083] In certain embodiments, provided herein is a TRGV9 antibody comprising a VH region, VL region, VH CDR1, VH CDR2, VH CDR3, VL CDR1, VL CDR2, and/or VL CDR3 of any one of the antibodies described herein. In some embodiments, provided herein is a TRGV9 antibody comprising a VH region of any one of the antibodies described herein. In some embodiments, provided herein is a TRGV9 antibody comprising a VL region of any one of the antibodies described herein. In some embodiments, provided herein is a TRGV9 antibody comprising a VH region of any one of the antibodies described herein, and a VL region of any one of the antibodies described herein. In some embodiments, provided herein is a TRGV9 antibody comprising a VH CDR1, VH CDR2, and VH CDR3 of any one of the antibodies described herein. In some embodiments, provided herein is a TRGV9 antibody comprising a VL CDR1, VL CDR2, and VL CDR3 of any one of the antibodies described herein. In some embodiments, provided herein is a TRGV9 antibody comprising a VH CDR1, VH CDR2, and VH CDR3 of any one of the antibodies described herein; and a VL CDR1, VL CDR2, and VL CDR3 of any one of the antibodies described herein. Representative VH and VL amino acid sequences, including VH CDR1, VH CDR2, VH CDR3, VL CDR1, VL CDR2 and VL CDR3 amino acid sequences, of TRGV9 antibodies provided herein are provided in the Tables 2-7.

[0084] In one aspect, provided herein is an antibody that binds to TRDV2. In some embodiments, provided herein is an antibody that binds to a TRDV2 antigen. In some embodiments, provided herein is an antibody that binds to a TRDV2 epitope.

[0085] In some embodiments, the antibody comprises a heavy chain variable region and a light chain variable region. In a some embodiments, the TRDV2 antibody is not a single domain antibody or nanobody. In some embodiments, the TRDV2 antibody is a humanized antibody. In some embodiments, the TRDV2 antibody is a fully human antibody.

[0086] In certain embodiments, provided herein is a TRDV2 antibody comprising a VH region, VL region, VH CDR1, VH CDR2, VH CDR3, VL CDR1, VL CDR2, and/or VL CDR3 of any one of the antibodies described herein. In some embodiments, provided herein is a TRDV2 antibody comprising a VH region of any one of the antibodies described herein. In some embodiments, provided herein is a TRDV2 antibody comprising a VL region of any one of the antibodies described herein. In some embodiments, provided herein is a TRDV2 antibody comprising a VH region of any one of the antibodies described herein, and a VL region of any one of the antibodies described herein. In some embodiments, provided herein is a TRDV2 antibody comprising a VH CDR1, VH CDR2, and VH CDR3 of any one of the antibodies described herein. In some embodiments, provided herein is a TRDV2 antibody comprising a VL CDR1, VL CDR2, and VL CDR3 of any one of the antibodies described herein. In some embodiments, provided herein is a TRDV2 antibody comprising a VH CDR1, VH CDR2, and VH CDR3 of any one of the antibodies described herein; and a VL CDR1, VL CDR2, and VL CDR3 of any one of the antibodies described herein. Representative VH and VL amino acid sequences, including VH CDR1, VH CDR2, VH CDR3, VL CDR1, VL CDR2 and VL CDR3 amino acid sequences, of TRDV2 antibodies provided herein are provided in Tables 2-7.

[0087] In one aspect, provided herein is an antibody that binds to TRGDC. In some embodiments, provided herein is an antibody that binds to a TRGDC antigen. In some embodiments, provided herein is an antibody that binds to a TRGDC epitope.

[0088] In some embodiments, the antibody comprises a heavy chain variable region and a light chain variable region. In a some embodiments, the TRGDC antibody is not a single domain antibody or nanobody. In some embodiments, the TRGDC antibody is a humanized antibody. In some embodiments, the TRGDC antibody is a fully human antibody.

[0089] In certain embodiments, provided herein is a TRGDC antibody comprising a VH region, VL region, VH CDR1, VH CDR2, VH CDR3, VL CDR1, VL CDR2, and/or VL CDR3 of any one of the antibodies described herein. In some embodiments, provided herein is a TRGDC antibody comprising a VH region of any one of the antibodies described herein. In some embodiments, provided herein is a TRGDC antibody comprising a VL region of any one of the antibodies described herein. In some embodiments, provided herein is a TRGDC antibody comprising a VH region of any one of the antibodies described herein, and a VL region of any one of the antibodies described herein. In some embodiments, provided herein is a TRGDC antibody comprising a VH CDR1, VH CDR2, and VH CDR3 of any one of the antibodies described herein. In some embodiments, provided herein is a TRGDC antibody comprising a VL CDR1, VL CDR2, and VL CDR3 of any one of the antibodies described herein. In some embodiments, provided herein is a TRGDC antibody comprising a VH CDR1, VH CDR2, and VH CDR3 of any one of the antibodies described herein; and a VL CDR1, VL CDR2, and VL CDR3 of any one of the antibodies described herein. Representative VH and VL amino acid sequences, including VH CDR1, VH CDR2, VH CDR3, VL CDR1, VL CDR2 and VL CDR3 amino acid sequences, of TRGDC antibodies provided herein are provided in Tables 2-7.

[0090] In some embodiments, the antibody specifically binds TRGV9. In other embodiments, the TRGV9 is present on the surface of a T cell. In some embodiments, the antibody specifically binds TRDV2. In other embodiments, the TRDV2 is present on the surface of a T cell. In some embodiments, the antibody specifically binds TRGDC. In other embodiments, the TRGDC is present on the surface of a T cell.

[0091] In some embodiments, the antibody is a humanized antibody. In certain embodiments, the antibody is an IgG antibody. In other embodiments, the IgG antibody is an IgG1, IgG2, IgG3, or IgG4 antibody. In some embodiments, the antibody is a bispecific antibody. In some embodiments, the antibody is a trispecific antibody. In some embodiments, the antibody is a quadraspecific antibody. In certain embodiments, the antibody is multivalent. In other embodiments, the antibody is capable of binding at least three antigens. In some embodiments, the antibody is capable of binding at least four antigens. In some embodiments, the antibody is capable of binding at least five antigens.

[0092] In certain embodiments, provided is a TRGV9 antibody that is an intact antibody. In other embodiments, provided is a TRGV9 antibody is an antigen binding fragment of the TRGV9 antibody. In some embodiments, the antigen binding fragment of the TRGV9 antibody is a functional fragment. In certain embodiments, provided is a TRDV2 antibody that is an intact antibody. In other embodiments, provided is a TRDV2 antibody is an antigen binding fragment of the TRDV2 antibody. In some embodiments, the antigen binding fragment of the TRDV2 antibody is a functional fragment. In certain embodiments, provided is a TRGDC antibody that is an intact antibody. In other embodiments, provided is a TRGDC antibody is an antigen binding fragment of the TRGDC antibody. In some embodiments, the antigen binding fragment of the TRGDC antibody is a functional fragment.

[0093] In some embodiments, the antigen binding fragment is a diabody. In some embodiments, the antigen binding fragment is a Fab. In some embodiments, the antigen binding fragment is a Fab′. In some embodiments, the antigen binding fragment is a F(ab′)2. In some embodiments, the antigen binding fragment is a Fv fragment. In some embodiments, the antigen binding fragment is a disulfide stabilized Fv fragment (dsFv). In some embodiments, the antigen binding fragment is a (dsFv)₂. In some embodiments, the antigen binding fragment is a bispecific dsFv (dsFv-dsFv′). In some embodiments, the antigen binding fragment is a disulfide stabilized diabody (ds diabody). In some embodiments, the antigen binding fragment is a single-chain antibody molecule (scFv). In some embodiments, the antigen binding fragment is a single domain antibody (sdAb). In some embodiments, the antigen binding fragment is an scFv dimer (bivalent diabody). In some embodiments, the antigen binding fragment is a multispecific antibody formed from a portion of an antibody comprising one or more CDRs. In some embodiments, the antigen binding fragment is a camelized single domain antibody. In some embodiments, the antigen binding fragment is a nanobody. In some embodiments, the antigen binding fragment is a domain antibody. In some embodiments, the antigen binding fragment is a bivalent domain antibody. In some embodiments, the antigen binding fragment is an antibody fragment that binds to an antigen but does not comprise a complete antibody structure.

[0094] In specific embodiments, the TRGV9 antibody comprises a VH region and a VL region. In some embodiments, the TRGV9 antibody is a single chain antibody. In some embodiments, the TRGV9 antibody is a single domain antibody. In some embodiments, the TRGV9 antibody is a nanobody. In certain embodiments, the TRGV9 antibody is a VHH antibody. In certain embodiments, the TRGV9 antibody is a llama antibody. In some embodiments, the TRGV9 antibody is not a single chain antibody. In some embodiments, the TRGV9 antibody is not a single domain antibody. In some embodiments, the TRGV9 antibody is not a nanobody. In certain embodiments, the TRGV9 antibody is not a VHH antibody. In certain embodiments, the TRGV9 antibody is not a llama antibody. In some embodiments, the TRGV9 antibody is a multispecific antibody In other embodiments, the TRGV9 antibody is a bispecific antibody. In other embodiments, the TRGV9 antibody is a trispecific antibody. In other embodiments, the TRGV9 antibody is a quadraspecific antibody. In certain embodiments, the multispecific antibody comprises an antigen binding fragment of a TRGV9 antibody provided herein. In other embodiments, the bispecific antibody comprises an antigen binding fragment of a TRGV9 antibody provided herein. In other embodiments, the trispecific antibody comprises an antigen binding fragment of a TRGV9 antibody provided herein. In other embodiments, the quadraspecific antibody comprises an antigen binding fragment of a TRGV9 antibody provided herein. In In certain embodiments, the TRGV9 antibody activates T cells. In other embodiments, the TRGV9 antibody is an antagonistic antibody. In certain embodiments, the TRGV9 antibody inactivates T cells. In some embodiments, the TRGV9 antibody blocks activation of T cells. In some embodiments, the TRGV9 antibody modulates the activity of T cells. In some embodiments, the TRGV9 antibody neither activates or inactivates the activity of T cells. In specific embodiments, the T cells are human T cells.

[0095] In specific embodiments, the TRDV2 antibody comprises a VH region and a VL region. In some embodiments, the TRDV2 antibody is a single chain antibody. In some embodiments, the TRDV2 antibody is a single domain antibody. In some embodiments, the TRDV2 antibody is a nanobody. In certain embodiments, the TRDV2 antibody is a VHH antibody. In certain embodiments, the TRDV2 antibody is a llama antibody. In some embodiments, the TRDV2 antibody is not a single chain antibody. In some embodiments, the TRDV2 antibody is not a single domain antibody. In some embodiments, the TRDV2 antibody is not a nanobody. In certain embodiments, the TRDV2 antibody is not a VHH antibody. In certain embodiments, the TRDV2 antibody is not a llama antibody. In some embodiments, the TRDV2 antibody is a multispecific antibody In other embodiments, the TRDV2 antibody is a bispecific antibody. In other embodiments, the TRDV2 antibody is a trispecific antibody. In other embodiments, the TRDV2 antibody is a quadraspecific antibody. In certain embodiments, the multispecific antibody comprises an antigen binding fragment of a TRDV2 antibody provided herein. In other embodiments, the bispecific antibody comprises an antigen binding fragment of a TRDV2 antibody provided herein. In other embodiments, the trispecific antibody comprises an antigen binding fragment of a TRDV2 antibody provided herein. In other embodiments, the quadraspecific antibody comprises an antigen binding fragment of a TRDV2 antibody provided herein. In In certain embodiments, the TRDV2 antibody activates T cells. In other embodiments, the TRDV2 antibody is an antagonistic antibody. In certain embodiments, the TRDV2 antibody inactivates T cells. In some embodiments, the TRDV2 antibody blocks activation of T cells. In some embodiments, the TRDV2 antibody modulates the activity of T cells. In some embodiments, the TRDV2 antibody neither activates or inactivates the activity of T cells. In specific embodiments, the T cells are human T cells.

[0096] In specific embodiments, the TRGDC antibody comprises a VH region and a VL region. In some embodiments, the TRGDC antibody is a single chain antibody. In some embodiments, the TRGDC antibody is a single domain antibody. In some embodiments, the TRGDC antibody is a nanobody. In certain embodiments, the TRGDC antibody is a VHH antibody. In certain embodiments, the TRGDC antibody is a llama antibody. In some embodiments, the TRGDC antibody is not a single chain antibody. In some embodiments, the TRGDC antibody is not a single domain antibody. In some embodiments, the TRGDC antibody is not a nanobody. In certain embodiments, the TRGDC antibody is not a VHH antibody. In certain embodiments, the TRGDC antibody is not a llama antibody. In some embodiments, the TRGDC antibody is a multispecific antibody In other embodiments, the TRGDC antibody is a bispecific antibody. In other embodiments, the TRGDC antibody is a trispecific antibody. In other embodiments, the TRGDC antibody is a quadraspecific antibody. In certain embodiments, the multispecific antibody comprises an antigen binding fragment of a TRGDC antibody provided herein. In other embodiments, the bispecific antibody comprises an antigen binding fragment of a TRGDC antibody provided herein. In other embodiments, the trispecific antibody comprises an antigen binding fragment of a TRGDC antibody provided herein. In other embodiments, the quadraspecific antibody comprises an antigen binding fragment of a TRGDC antibody provided herein. In In certain embodiments, the TRGDC antibody activates T cells. In other embodiments, the TRGDC antibody is an antagonistic antibody. In certain embodiments, the TRGDC antibody inactivates T cells. In some embodiments, the TRGDC antibody blocks activation of T cells. In some embodiments, the TRGDC antibody modulates the activity of T cells. In some embodiments, the TRGDC antibody neither activates or inactivates the activity of T cells. In specific embodiments, the T cells are human T cells.

[0097] In some embodiments, the VH CDR1, VH CDR2, VH CDR3, VL CDR1, VL CDR2, and VL CDR3 sequences are according to the Kabat numbering system. In some embodiments, the VH CDR1, VH CDR2, VH CDR3, VL CDR1, VL CDR2, and VL CDR3 sequences are according to the Chothia numbering system. In some embodiments, the VH CDR1, VH CDR2, VH CDR3, VL CDR1, VL CDR2, and VL CDR3 sequences are according to the Exemplary numbering system. In some embodiments, the VH CDR1, VH CDR2, VH CDR3, VL CDR1, VL CDR2, and VL CDR3 sequences are according to the Contact numbering system. In some embodiments, the VH CDR1, VH CDR2, VH CDR3, VL CDR1, VL CDR2, and VL CDR3 sequences are according to the IMGT numbering system. In some embodiments, the VH CDR1, VH CDR2, VH CDR3, VL CDR1, VL CDR2, and VL CDR3 sequences are according to the AbM numbering system. Exemplary sets of 6 CDRs (VH CDR1-3 and VL CDR1-3) of certain antibody embodiments are provided herein. Other sets of CDRs are contemplated and within the scope of the antibody embodiments provided herein.

[0098] In one aspect, provided herein is an antibody that binds to TRGV9. In some embodiments, the antibody comprises a heavy chain variable region and a light chain variable region. In some embodiments, the TRGV9 antibody is a humanized antibody.

[0099] In one aspect, provided herein is an antibody that binds TRGV9, comprising: (i) a VH comprising a VH CDR1, a VH CDR2, and a VH CDR3 having an amino acid sequence of SEQ ID NOs:1, 2, and 3, respectively, and (ii) a VL comprising a VL CDR1, VL CDR2, and VL CDR3 having an amino acid sequence of SEQ ID NOs:4, 5, and 6, respectively. In one aspect, provided herein is an antibody that binds TRGV9, comprising: (i) a VH comprising a VH CDR1, a VH CDR2, and a VH CDR3 having an amino acid sequence of SEQ ID NOs:7, 8, and 9, respectively, and (ii) a VL comprising a VL CDR1, VL CDR2, and VL CDR3 having an amino acid sequence of SEQ ID NOs:10, 11, and 12, respectively. In one aspect, provided herein is an antibody that binds TRGV9, comprising: (i) a VH comprising a VH CDR1, a VH CDR2, and a VH CDR3 having an amino acid sequence of SEQ ID NOs:13, 14, and 15, respectively, and (ii) a VL comprising a VL CDR1, VL CDR2, and VL CDR3 having an amino acid sequence of SEQ ID NOs:16, 17, and 18, respectively. In one aspect, provided herein is an antibody that binds TRGV9, comprising: (i) a VH comprising a VH CDR1, a VH CDR2, and a VH CDR3 having an amino acid sequence of SEQ ID NOs:19, 20, and 21, respectively, and (ii) a VL comprising a VL CDR1, VL CDR2, and VL CDR3 having an amino acid sequence of SEQ ID NOs:22, 23, and 24, respectively. In one aspect, provided herein is an antibody that binds TRGV9, comprising: (i) a VH comprising a VH CDR1, a VH CDR2, and a VH CDR3 having an amino acid sequence of SEQ ID NOs:25, 26, and 27, respectively, and (ii) a VL comprising a VL CDR1, VL CDR2, and VL CDR3 having an amino acid sequence of SEQ ID NOs:28, 29, and 30, respectively. In one aspect, provided herein is an antibody that binds TRGV9, comprising: (i) a VH comprising a VH CDR1, a VH CDR2, and a VH CDR3 having an amino acid sequence of a VH CDR1, a VH CDR2, and a VH CDR3, respectively, of a VH having an amino acid sequence of SEQ ID NO:31; and (ii) a VL comprising a VL CDR1, a VL CDR2, and a VL CDR3 having an amino acid sequence of a VL CDR1, a VL CDR2, and a VL CDR3, respectively, of SEQ ID NO:32. In one aspect, provided herein is an antibody that binds TRGV9, comprising a VH having an amino acid sequence of SEQ ID NO:31. In one aspect, provided herein is an antibody that binds TRGV9, comprising a VL having an amino acid sequence of SEQ ID NO:32. In one aspect, provided herein is an antibody that binds TRGV9, comprising a VH having an amino acid sequence of SEQ ID NO:31, and a VL having an amino acid sequence of SEQ ID NO:32. In one aspect, provided herein is an antibody that binds TRGV9, comprising a heavy chain having an amino acid sequence of SEQ ID NO:33. In one aspect, provided herein is an antibody that binds TRGV9, comprising a light chain having an amino acid sequence of SEQ ID NO:34. In one aspect, provided herein is an antibody that binds TRGV9, comprising a heavy chain having an amino acid sequence of SEQ ID NO:33, and a light chain having an amino acid sequence of SEQ ID NO:34. In one aspect, provided herein is an antibody that binds TRGV9, comprising a VH having an amino acid sequence having at least 95% identity to an amino acid sequence of SEQ ID NO:31. In one aspect, provided herein is an antibody that binds TRGV9, comprising a VL having an amino acid sequence having at least 95% identity to an amino acid sequence of SEQ ID NO:32. In one aspect, provided herein is an antibody that binds TRGV9, comprising a VH having an amino acid sequence having at least 95% identity to an amino acid sequence of SEQ ID NO:31, and a VL having an amino acid sequence having at least 95% identity to an amino acid sequence of SEQ ID NO:32. In one aspect, provided herein is an antibody that binds TRGV9, comprising a heavy chain having an amino acid sequence having at least 95% identity to an amino acid sequence of SEQ ID NO:33. In one aspect, provided herein is an antibody that binds TRGV9, comprising a light chain having an amino acid sequence having at least 95% identity to an amino acid sequence of SEQ ID NO:34. In one aspect, provided herein is an antibody that binds TRGV9, comprising a heavy chain having an amino acid sequence having at least 95% identity to an amino acid sequence of SEQ ID NO:33, and a light chain having an amino acid sequence having at least 95% identity to an amino acid sequence of SEQ ID NO:34.

[0100] In one aspect, provided herein is an antibody that binds TRGV9, comprising: (i) a VH comprising a VH CDR1, a VH CDR2, and a VH CDR3 having an amino acid sequence of SEQ ID NOs:35, 36, and 37, respectively, and (ii) a VL comprising a VL CDR1, VL CDR2, and VL CDR3 having an amino acid sequence of SEQ ID NOs:38, 39, and 40, respectively. In one aspect, provided herein is an antibody that binds TRGV9, comprising: (i) a VH comprising a VH CDR1, a VH CDR2, and a VH CDR3 having an amino acid sequence of SEQ ID NOs:41, 42, and 43, respectively, and (ii) a VL comprising a VL CDR1, VL CDR2, and VL CDR3 having an amino acid sequence of SEQ ID NOs:44, 45, and 46, respectively. In one aspect, provided herein is an antibody that binds TRGV9, comprising: (i) a VH comprising a VH CDR1, a VH CDR2, and a VH CDR3 having an amino acid sequence of SEQ ID NOs:47, 48, and 49, respectively, and (ii) a VL comprising a VL CDR1, VL CDR2, and VL CDR3 having an amino acid sequence of SEQ ID NOs:50, 51, and 52, respectively. In one aspect, provided herein is an antibody that binds TRGV9, comprising: (i) a VH comprising a VH CDR1, a VH CDR2, and a VH CDR3 having an amino acid sequence of SEQ ID NOs:53, 54, and 55, respectively, and (ii) a VL comprising a VL CDR1, VL CDR2, and VL CDR3 having an amino acid sequence of SEQ ID NOs:56, 57, and 58, respectively. In one aspect, provided herein is an antibody that binds TRGV9, comprising: (i) a VH comprising a VH CDR1, a VH CDR2, and a VH CDR3 having an amino acid sequence of SEQ ID NOs:59, 60, and 61, respectively, and (ii) a VL comprising a VL CDR1, VL CDR2, and VL CDR3 having an amino acid sequence of SEQ ID NOs:62, 63, and 64, respectively. In one aspect, provided herein is an antibody that binds TRGV9, comprising: (i) a VH comprising a VH CDR1, a VH CDR2, and a VH CDR3 having an amino acid sequence of a VH CDR1, a VH CDR2, and a VH CDR3, respectively, of a VH having an amino acid sequence of SEQ ID NO:65; and (ii) a VL comprising a VL CDR1, a VL CDR2, and a VL CDR3 having an amino acid sequence of a VL CDR1, a VL CDR2, and a VL CDR3, respectively, of SEQ ID NO:66. In one aspect, provided herein is an antibody that binds TRGV9, comprising a VH having an amino acid sequence of SEQ ID NO:65. In one aspect, provided herein is an antibody that binds TRGV9, comprising a VL having an amino acid sequence of SEQ ID NO:66. In one aspect, provided herein is an antibody that binds TRGV9, comprising a VH having an amino acid sequence of SEQ ID NO:65, and a VL having an amino acid sequence of SEQ ID NO:66. In one aspect, provided herein is an antibody that binds TRGV9, comprising a heavy chain having an amino acid sequence of SEQ ID NO:67. In one aspect, provided herein is an antibody that binds TRGV9, comprising a light chain having an amino acid sequence of SEQ ID NO:68. In one aspect, provided herein is an antibody that binds TRGV9, comprising a heavy chain having an amino acid sequence of SEQ ID NO:67, and a light chain having an amino acid sequence of SEQ ID NO:68. In one aspect, provided herein is an antibody that binds TRGV9, comprising a VH having an amino acid sequence having at least 95% identity to an amino acid sequence of SEQ ID NO:65. In one aspect, provided herein is an antibody that binds TRGV9, comprising a VL having an amino acid sequence having at least 95% identity to an amino acid sequence of SEQ ID NO:66. In one aspect, provided herein is an antibody that binds TRGV9, comprising a VH having an amino acid sequence having at least 95% identity to an amino acid sequence of SEQ ID NO:65, and a VL having an amino acid sequence having at least 95% identity to an amino acid sequence of SEQ ID NO:66. In one aspect, provided herein is an antibody that binds TRGV9, comprising a heavy chain having an amino acid sequence having at least 95% identity to an amino acid sequence of SEQ ID NO:67. In one aspect, provided herein is an antibody that binds TRGV9, comprising a light chain having an amino acid sequence having at least 95% identity to an amino acid sequence of SEQ ID NO:68. In one aspect, provided herein is an antibody that binds TRGV9, comprising a heavy chain having an amino acid sequence having at least 95% identity to an amino acid sequence of SEQ ID NO:67, and a light chain having an amino acid sequence having at least 95% identity to an amino acid sequence of SEQ ID NO:68.

[0101] In one aspect, provided herein is an antibody that binds TRGV9, comprising: (i) a VH comprising a VH CDR1, a VH CDR2, and a VH CDR3 having an amino acid sequence of SEQ ID NOs:69, 70, and 71, respectively, and (ii) a VL comprising a VL CDR1, VL CDR2, and VL CDR3 having an amino acid sequence of SEQ ID NOs:72, 73, and 74, respectively. In one aspect, provided herein is an antibody that binds TRGV9, comprising: (i) a VH comprising a VH CDR1, a VH CDR2, and a VH CDR3 having an amino acid sequence of SEQ ID NOs:75, 76, and 77, respectively, and (ii) a VL comprising a VL CDR1, VL CDR2, and VL CDR3 having an amino acid sequence of SEQ ID NOs:78, 79, and 80, respectively. In one aspect, provided herein is an antibody that binds TRGV9, comprising: (i) a VH comprising a VH CDR1, a VH CDR2, and a VH CDR3 having an amino acid sequence of SEQ ID NOs:81, 82, and 83, respectively, and (ii) a VL comprising a VL CDR1, VL CDR2, and VL CDR3 having an amino acid sequence of SEQ ID NOs:84, 85, and 86, respectively. In one aspect, provided herein is an antibody that binds TRGV9, comprising: (i) a VH comprising a VH CDR1, a VH CDR2, and a VH CDR3 having an amino acid sequence of SEQ ID NOs:87, 88, and 89, respectively, and (ii) a VL comprising a VL CDR1, VL CDR2, and VL CDR3 having an amino acid sequence of SEQ ID NOs:90, 91, and 92, respectively. In one aspect, provided herein is an antibody that binds TRGV9, comprising: (i) a VH comprising a VH CDR1, a VH CDR2, and a VH CDR3 having an amino acid sequence of SEQ ID NOs:93, 94, and 95, respectively, and (ii) a VL comprising a VL CDR1, VL CDR2, and VL CDR3 having an amino acid sequence of SEQ ID NOs:96, 97, and 98, respectively. In one aspect, provided herein is an antibody that binds TRGV9, comprising: (i) a VH comprising a VH CDR1, a VH CDR2, and a VH CDR3 having an amino acid sequence of a VH CDR1, a VH CDR2, and a VH CDR3, respectively, of a VH having an amino acid sequence of SEQ ID NO:99; and (ii) a VL comprising a VL CDR1, a VL CDR2, and a VL CDR3 having an amino acid sequence of a VL CDR1, a VL CDR2, and a VL CDR3, respectively, of SEQ ID NO:100. In one aspect, provided herein is an antibody that binds TRGV9, comprising a VH having an amino acid sequence of SEQ ID NO:99. In one aspect, provided herein is an antibody that binds TRGV9, comprising a VL having an amino acid sequence of SEQ ID NO:100. In one aspect, provided herein is an antibody that binds TRGV9, comprising a VH having an amino acid sequence of SEQ ID NO:99, and a VL having an amino acid sequence of SEQ ID NO:100. In one aspect, provided herein is an antibody that binds TRGV9, comprising a heavy chain having an amino acid sequence of SEQ ID NO:101. In one aspect, provided herein is an antibody that binds TRGV9, comprising a light chain having an amino acid sequence of SEQ ID NO:102. In one aspect, provided herein is an antibody that binds TRGV9, comprising a heavy chain having an amino acid sequence of SEQ ID NO:101, and a light chain having an amino acid sequence of SEQ ID NO:102. In one aspect, provided herein is an antibody that binds TRGV9, comprising a VH having an amino acid sequence having at least 95% identity to an amino acid sequence of SEQ ID NO:99. In one aspect, provided herein is an antibody that binds TRGV9, comprising a VL having an amino acid sequence having at least 95% identity to an amino acid sequence of SEQ ID NO:100. In one aspect, provided herein is an antibody that binds TRGV9, comprising a VH having an amino acid sequence having at least 95% identity to an amino acid sequence of SEQ ID NO:99, and a VL having an amino acid sequence having at least 95% identity to an amino acid sequence of SEQ ID NO:100. In one aspect, provided herein is an antibody that binds TRGV9, comprising a heavy chain having an amino acid sequence having at least 95% identity to an amino acid sequence of SEQ ID NO:101. In one aspect, provided herein is an antibody that binds TRGV9, comprising a light chain having an amino acid sequence having at least 95% identity to an amino acid sequence of SEQ ID NO:102. In one aspect, provided herein is an antibody that binds TRGV9, comprising a heavy chain having an amino acid sequence having at least 95% identity to an amino acid sequence of SEQ ID NO:101, and a light chain having an amino acid sequence having at least 95% identity to an amino acid sequence of SEQ ID NO:102.

[0102] In one aspect, provided herein is an antibody that binds TRGV9, comprising: (i) a VH comprising a VH CDR1, a VH CDR2, and a VH CDR3 having an amino acid sequence of SEQ ID NOs:103, 104, and 105, respectively, and (ii) a VL comprising a VL CDR1, VL CDR2, and VL CDR3 having an amino acid sequence of SEQ ID NOs:106, 107, and 108, respectively. In one aspect, provided herein is an antibody that binds TRGV9, comprising: (i) a VH comprising a VH CDR1, a VH CDR2, and a VH CDR3 having an amino acid sequence of SEQ ID NOs:109, 110, and 111, respectively, and (ii) a VL comprising a VL CDR1, VL CDR2, and VL CDR3 having an amino acid sequence of SEQ ID NOs:112, 113, and 114, respectively. In one aspect, provided herein is an antibody that binds TRGV9, comprising: (i) a VH comprising a VH CDR1, a VH CDR2, and a VH CDR3 having an amino acid sequence of SEQ ID NOs:115, 116, and 117, respectively, and (ii) a VL comprising a VL CDR1, VL CDR2, and VL CDR3 having an amino acid sequence of SEQ ID NOs:118, 119, and 120, respectively. In one aspect, provided herein is an antibody that binds TRGV9, comprising: (i) a VH comprising a VH CDR1, a VH CDR2, and a VH CDR3 having an amino acid sequence of SEQ ID NOs:121, 122, and 123, respectively, and (ii) a VL comprising a VL CDR1, VL CDR2, and VL CDR3 having an amino acid sequence of SEQ ID NOs:124, 125, and 126, respectively. In one aspect, provided herein is an antibody that binds TRGV9, comprising: (i) a VH comprising a VH CDR1, a VH CDR2, and a VH CDR3 having an amino acid sequence of SEQ ID NOs:127, 128, and 129, respectively, and (ii) a VL comprising a VL CDR1, VL CDR2, and VL CDR3 having an amino acid sequence of SEQ ID NOs:130, 131, and 132, respectively. In one aspect, provided herein is an antibody that binds TRGV9, comprising: (i) a VH comprising a VH CDR1, a VH CDR2, and a VH CDR3 having an amino acid sequence of a VH CDR1, a VH CDR2, and a VH CDR3, respectively, of a VH having an amino acid sequence of SEQ ID NO:133; and (ii) a VL comprising a VL CDR1, a VL CDR2, and a VL CDR3 having an amino acid sequence of a VL CDR1, a VL CDR2, and a VL CDR3, respectively, of SEQ ID NO:134. In one aspect, provided herein is an antibody that binds TRGV9, comprising a VH having an amino acid sequence of SEQ ID NO:133. In one aspect, provided herein is an antibody that binds TRGV9, comprising a VL having an amino acid sequence of SEQ ID NO:134. In one aspect, provided herein is an antibody that binds TRGV9, comprising a VH having an amino acid sequence of SEQ ID NO:133, and a VL having an amino acid sequence of SEQ ID NO:134. In one aspect, provided herein is an antibody that binds TRGV9, comprising a heavy chain having an amino acid sequence of SEQ ID NO:135. In one aspect, provided herein is an antibody that binds TRGV9, comprising a light chain having an amino acid sequence of SEQ ID NO:136. In one aspect, provided herein is an antibody that binds TRGV9, comprising a heavy chain having an amino acid sequence of SEQ ID NO:135, and a light chain having an amino acid sequence of SEQ ID NO:136. In one aspect, provided herein is an antibody that binds TRGV9, comprising a VH having an amino acid sequence having at least 95% identity to an amino acid sequence of SEQ ID NO:133. In one aspect, provided herein is an antibody that binds TRGV9, comprising a VL having an amino acid sequence having at least 95% identity to an amino acid sequence of SEQ ID NO:134. In one aspect, provided herein is an antibody that binds TRGV9, comprising a VH having an amino acid sequence having at least 95% identity to an amino acid sequence of SEQ ID NO:133, and a VL having an amino acid sequence having at least 95% identity to an amino acid sequence of SEQ ID NO:134. In one aspect, provided herein is an antibody that binds TRGV9, comprising a heavy chain having an amino acid sequence having at least 95% identity to an amino acid sequence of SEQ ID NO:135. In one aspect, provided herein is an antibody that binds TRGV9, comprising a light chain having an amino acid sequence having at least 95% identity to an amino acid sequence of SEQ ID NO:136. In one aspect, provided herein is an antibody that binds TRGV9, comprising a heavy chain having an amino acid sequence having at least 95% identity to an amino acid sequence of SEQ ID NO:135, and a light chain having an amino acid sequence having at least 95% identity to an amino acid sequence of SEQ ID NO:136.

[0103] In one aspect, provided herein is an antibody that binds TRGV9, comprising: (i) a VH comprising a VH CDR1, a VH CDR2, and a VH CDR3 having an amino acid sequence of SEQ ID NOs:137, 138, and 139, respectively, and (ii) a VL comprising a VL CDR1, VL CDR2, and VL CDR3 having an amino acid sequence of SEQ ID NOs:140, 141, and 142, respectively. In one aspect, provided herein is an antibody that binds TRGV9, comprising: (i) a VH comprising a VH CDR1, a VH CDR2, and a VH CDR3 having an amino acid sequence of SEQ ID NOs:143, 144, and 145, respectively, and (ii) a VL comprising a VL CDR1, VL CDR2, and VL CDR3 having an amino acid sequence of SEQ ID NOs:146, 147, and 148, respectively. In one aspect, provided herein is an antibody that binds TRGV9, comprising: (i) a VH comprising a VH CDR1, a VH CDR2, and a VH CDR3 having an amino acid sequence of SEQ ID NOs:149, 150, and 151, respectively, and (ii) a VL comprising a VL CDR1, VL CDR2, and VL CDR3 having an amino acid sequence of SEQ ID NOs:152, 153, and 154, respectively. In one aspect, provided herein is an antibody that binds TRGV9, comprising: (i) a VH comprising a VH CDR1, a VH CDR2, and a VH CDR3 having an amino acid sequence of SEQ ID NOs:155, 156, and 157, respectively, and (ii) a VL comprising a VL CDR1, VL CDR2, and VL CDR3 having an amino acid sequence of SEQ ID NOs:158, 159, and 160, respectively. In one aspect, provided herein is an antibody that binds TRGV9, comprising: (i) a VH comprising a VH CDR1, a VH CDR2, and a VH CDR3 having an amino acid sequence of SEQ ID NOs:161, 162, and 163, respectively, and (ii) a VL comprising a VL CDR1, VL CDR2, and VL CDR3 having an amino acid sequence of SEQ ID NOs:164, 165, and 166, respectively. In one aspect, provided herein is an antibody that binds TRGV9, comprising: (i) a VH comprising a VH CDR1, a VH CDR2, and a VH CDR3 having an amino acid sequence of a VH CDR1, a VH CDR2, and a VH CDR3, respectively, of a VH having an amino acid sequence of SEQ ID NO:167; and (ii) a VL comprising a VL CDR1, a VL CDR2, and a VL CDR3 having an amino acid sequence of a VL CDR1, a VL CDR2, and a VL CDR3, respectively, of SEQ ID NO:168. In one aspect, provided herein is an antibody that binds TRGV9, comprising a VH having an amino acid sequence of SEQ ID NO:167. In one aspect, provided herein is an antibody that binds TRGV9, comprising a VL having an amino acid sequence of SEQ ID NO:168. In one aspect, provided herein is an antibody that binds TRGV9, comprising a VH having an amino acid sequence of SEQ ID NO:167, and a VL having an amino acid sequence of SEQ ID NO:168. In one aspect, provided herein is an antibody that binds TRGV9, comprising a heavy chain having an amino acid sequence of SEQ ID NO:169. In one aspect, provided herein is an antibody that binds TRGV9, comprising a light chain having an amino acid sequence of SEQ ID NO:170. In one aspect, provided herein is an antibody that binds TRGV9, comprising a heavy chain having an amino acid sequence of SEQ ID NO:169, and a light chain having an amino acid sequence of SEQ ID NO:170. In one aspect, provided herein is an antibody that binds TRGV9, comprising a VH having an amino acid sequence having at least 95% identity to an amino acid sequence of SEQ ID NO:167. In one aspect, provided herein is an antibody that binds TRGV9, comprising a VL having an amino acid sequence having at least 95% identity to an amino acid sequence of SEQ ID NO:168. In one aspect, provided herein is an antibody that binds TRGV9, comprising a VH having an amino acid sequence having at least 95% identity to an amino acid sequence of SEQ ID NO:167, and a VL having an amino acid sequence having at least 95% identity to an amino acid sequence of SEQ ID NO:168. In one aspect, provided herein is an antibody that binds TRGV9, comprising a heavy chain having an amino acid sequence having at least 95% identity to an amino acid sequence of SEQ ID NO:169. In one aspect, provided herein is an antibody that binds TRGV9, comprising a light chain having an amino acid sequence having at least 95% identity to an amino acid sequence of SEQ ID NO:170. In one aspect, provided herein is an antibody that binds TRGV9, comprising a heavy chain having an amino acid sequence having at least 95% identity to an amino acid sequence of SEQ ID NO:169, and a light chain having an amino acid sequence having at least 95% identity to an amino acid sequence of SEQ ID NO:170.

[0104] In one aspect, provided herein is an antibody that binds TRGV9, comprising: (i) a VH comprising a VH CDR1, a VH CDR2, and a VH CDR3 having an amino acid sequence of SEQ ID NOs:171, 172, and 173, respectively, and (ii) a VL comprising a VL CDR1, VL CDR2, and VL CDR3 having an amino acid sequence of SEQ ID NOs:174, 175, and 176, respectively. In one aspect, provided herein is an antibody that binds TRGV9, comprising: (i) a VH comprising a VH CDR1, a VH CDR2, and a VH CDR3 having an amino acid sequence of SEQ ID NOs:177, 178, and 179, respectively, and (ii) a VL comprising a VL CDR1, VL CDR2, and VL CDR3 having an amino acid sequence of SEQ ID NOs:180, 181, and 182, respectively. In one aspect, provided herein is an antibody that binds TRGV9, comprising: (i) a VH comprising a VH CDR1, a VH CDR2, and a VH CDR3 having an amino acid sequence of SEQ ID NOs:183, 184, and 185, respectively, and (ii) a VL comprising a VL CDR1, VL CDR2, and VL CDR3 having an amino acid sequence of SEQ ID NOs:186, 187, and 188, respectively. In one aspect, provided herein is an antibody that binds TRGV9, comprising: (i) a VH comprising a VH CDR1, a VH CDR2, and a VH CDR3 having an amino acid sequence of SEQ ID NOs:189, 190, and 191, respectively, and (ii) a VL comprising a VL CDR1, VL CDR2, and VL CDR3 having an amino acid sequence of SEQ ID NOs:192, 193, and 194, respectively. In one aspect, provided herein is an antibody that binds TRGV9, comprising: (i) a VH comprising a VH CDR1, a VH CDR2, and a VH CDR3 having an amino acid sequence of SEQ ID NOs:195, 196, and 197, respectively, and (ii) a VL comprising a VL CDR1, VL CDR2, and VL CDR3 having an amino acid sequence of SEQ ID NOs:198, 199, and 200, respectively. In one aspect, provided herein is an antibody that binds TRGV9, comprising: (i) a VH comprising a VH CDR1, a VH CDR2, and a VH CDR3 having an amino acid sequence of a VH CDR1, a VH CDR2, and a VH CDR3, respectively, of a VH having an amino acid sequence of SEQ ID NO:201; and (ii) a VL comprising a VL CDR1, a VL CDR2, and a VL CDR3 having an amino acid sequence of a VL CDR1, a VL CDR2, and a VL CDR3, respectively, of SEQ ID NO:202. In one aspect, provided herein is an antibody that binds TRGV9, comprising a VH having an amino acid sequence of SEQ ID NO:201. In one aspect, provided herein is an antibody that binds TRGV9, comprising a VL having an amino acid sequence of SEQ ID NO:202. In one aspect, provided herein is an antibody that binds TRGV9, comprising a VH having an amino acid sequence of SEQ ID NO:201, and a VL having an amino acid sequence of SEQ ID NO:202. In one aspect, provided herein is an antibody that binds TRGV9, comprising a heavy chain having an amino acid sequence of SEQ ID NO:203. In one aspect, provided herein is an antibody that binds TRGV9, comprising a light chain having an amino acid sequence of SEQ ID NO:204. In one aspect, provided herein is an antibody that binds TRGV9, comprising a heavy chain having an amino acid sequence of SEQ ID NO:203, and a light chain having an amino acid sequence of SEQ ID NO:204. In one aspect, provided herein is an antibody that binds TRGV9, comprising a VH having an amino acid sequence having at least 95% identity to an amino acid sequence of SEQ ID NO:201. In one aspect, provided herein is an antibody that binds TRGV9, comprising a VL having an amino acid sequence having at least 95% identity to an amino acid sequence of SEQ ID NO:202. In one aspect, provided herein is an antibody that binds TRGV9, comprising a VH having an amino acid sequence having at least 95% identity to an amino acid sequence of SEQ ID NO:201, and a VL having an amino acid sequence having at least 95% identity to an amino acid sequence of SEQ ID NO:202. In one aspect, provided herein is an antibody that binds TRGV9, comprising a heavy chain having an amino acid sequence having at least 95% identity to an amino acid sequence of SEQ ID NO:203. In one aspect, provided herein is an antibody that binds TRGV9, comprising a light chain having an amino acid sequence having at least 95% identity to an amino acid sequence of SEQ ID NO:204. In one aspect, provided herein is an antibody that binds TRGV9, comprising a heavy chain having an amino acid sequence having at least 95% identity to an amino acid sequence of SEQ ID NO:203, and a light chain having an amino acid sequence having at least 95% identity to an amino acid sequence of SEQ ID NO:204.

[0105] In one aspect, provided herein is an antibody that binds TRGV9, comprising: (i) a VH comprising a VH CDR1, a VH CDR2, and a VH CDR3 having an amino acid sequence of SEQ ID NOs:205, 206, and 207, respectively, and (ii) a VL comprising a VL CDR1, VL CDR2, and VL CDR3 having an amino acid sequence of SEQ ID NOs:208, 209, and 210, respectively. In one aspect, provided herein is an antibody that binds TRGV9, comprising: (i) a VH comprising a VH CDR1, a VH CDR2, and a VH CDR3 having an amino acid sequence of SEQ ID NOs:211, 212, and 213, respectively, and (ii) a VL comprising a VL CDR1, VL CDR2, and VL CDR3 having an amino acid sequence of SEQ ID NOs:214, 215, and 216, respectively. In one aspect, provided herein is an antibody that binds TRGV9, comprising: (i) a VH comprising a VH CDR1, a VH CDR2, and a VH CDR3 having an amino acid sequence of SEQ ID NOs:217, 218, and 219, respectively, and (ii) a VL comprising a VL CDR1, VL CDR2, and VL CDR3 having an amino acid sequence of SEQ ID NOs:220, 221, and 222, respectively. In one aspect, provided herein is an antibody that binds TRGV9, comprising: (i) a VH comprising a VH CDR1, a VH CDR2, and a VH CDR3 having an amino acid sequence of SEQ ID NOs:223, 224, and 225, respectively, and (ii) a VL comprising a VL CDR1, VL CDR2, and VL CDR3 having an amino acid sequence of SEQ ID NOs:226, 227, and 228, respectively. In one aspect, provided herein is an antibody that binds TRGV9, comprising: (i) a VH comprising a VH CDR1, a VH CDR2, and a VH CDR3 having an amino acid sequence of SEQ ID NOs:229, 230, and 231, respectively, and (ii) a VL comprising a VL CDR1, VL CDR2, and VL CDR3 having an amino acid sequence of SEQ ID NOs:232, 233, and 234, respectively. In one aspect, provided herein is an antibody that binds TRGV9, comprising: (i) a VH comprising a VH CDR1, a VH CDR2, and a VH CDR3 having an amino acid sequence of a VH CDR1, a VH CDR2, and a VH CDR3, respectively, of a VH having an amino acid sequence of SEQ ID NO:235; and (ii) a VL comprising a VL CDR1, a VL CDR2, and a VL CDR3 having an amino acid sequence of a VL CDR1, a VL CDR2, and a VL CDR3, respectively, of SEQ ID NO:236. In one aspect, provided herein is an antibody that binds TRGV9, comprising a VH having an amino acid sequence of SEQ ID NO:235. In one aspect, provided herein is an antibody that binds TRGV9, comprising a VL having an amino acid sequence of SEQ ID NO:236. In one aspect, provided herein is an antibody that binds TRGV9, comprising a VH having an amino acid sequence of SEQ ID NO:235, and a VL having an amino acid sequence of SEQ ID NO:236. In one aspect, provided herein is an antibody that binds TRGV9, comprising a heavy chain having an amino acid sequence of SEQ ID NO:237. In one aspect, provided herein is an antibody that binds TRGV9, comprising a light chain having an amino acid sequence of SEQ ID NO:238. In one aspect, provided herein is an antibody that binds TRGV9, comprising a heavy chain having an amino acid sequence of SEQ ID NO:237, and a light chain having an amino acid sequence of SEQ ID NO:238. In one aspect, provided herein is an antibody that binds TRGV9, comprising a VH having an amino acid sequence having at least 95% identity to an amino acid sequence of SEQ ID NO:235. In one aspect, provided herein is an antibody that binds TRGV9, comprising a VL having an amino acid sequence having at least 95% identity to an amino acid sequence of SEQ ID NO:236. In one aspect, provided herein is an antibody that binds TRGV9, comprising a VH having an amino acid sequence having at least 95% identity to an amino acid sequence of SEQ ID NO:235, and a VL having an amino acid sequence having at least 95% identity to an amino acid sequence of SEQ ID NO:236. In one aspect, provided herein is an antibody that binds TRGV9, comprising a heavy chain having an amino acid sequence having at least 95% identity to an amino acid sequence of SEQ ID NO:237. In one aspect, provided herein is an antibody that binds TRGV9, comprising a light chain having an amino acid sequence having at least 95% identity to an amino acid sequence of SEQ ID NO:238. In one aspect, provided herein is an antibody that binds TRGV9, comprising a heavy chain having an amino acid sequence having at least 95% identity to an amino acid sequence of SEQ ID NO:237, and a light chain having an amino acid sequence having at least 95% identity to an amino acid sequence of SEQ ID NO:238.

[0106] In one aspect, provided herein is an antibody that binds TRGV9, comprising: (i) a VH comprising a VH CDR1, a VH CDR2, and a VH CDR3 having an amino acid sequence of SEQ ID NOs:239, 240, and 241, respectively, and (ii) a VL comprising a VL CDR1, VL CDR2, and VL CDR3 having an amino acid sequence of SEQ ID NOs:242, 243, and 244, respectively. In one aspect, provided herein is an antibody that binds TRGV9, comprising: (i) a VH comprising a VH CDR1, a VH CDR2, and a VH CDR3 having an amino acid sequence of SEQ ID NOs:245, 246, and 247, respectively, and (ii) a VL comprising a VL CDR1, VL CDR2, and VL CDR3 having an amino acid sequence of SEQ ID NOs:248, 249, and 250, respectively. In one aspect, provided herein is an antibody that binds TRGV9, comprising: (i) a VH comprising a VH CDR1, a VH CDR2, and a VH CDR3 having an amino acid sequence of SEQ ID NOs:251, 252, and 253, respectively, and (ii) a VL comprising a VL CDR1, VL CDR2, and VL CDR3 having an amino acid sequence of SEQ ID NOs:254, 255, and 256, respectively. In one aspect, provided herein is an antibody that binds TRGV9, comprising: (i) a VH comprising a VH CDR1, a VH CDR2, and a VH CDR3 having an amino acid sequence of SEQ ID NOs:257, 258, and 259, respectively, and (ii) a VL comprising a VL CDR1, VL CDR2, and VL CDR3 having an amino acid sequence of SEQ ID NOs:260, 261, and 262, respectively. In one aspect, provided herein is an antibody that binds TRGV9, comprising: (i) a VH comprising a VH CDR1, a VH CDR2, and a VH CDR3 having an amino acid sequence of SEQ ID NOs:263, 264, and 265, respectively, and (ii) a VL comprising a VL CDR1, VL CDR2, and VL CDR3 having an amino acid sequence of SEQ ID NOs:266, 267, and 268, respectively. In one aspect, provided herein is an antibody that binds TRGV9, comprising: (i) a VH comprising a VH CDR1, a VH CDR2, and a VH CDR3 having an amino acid sequence of a VH CDR1, a VH CDR2, and a VH CDR3, respectively, of a VH having an amino acid sequence of SEQ ID NO:269; and (ii) a VL comprising a VL CDR1, a VL CDR2, and a VL CDR3 having an amino acid sequence of a VL CDR1, a VL CDR2, and a VL CDR3, respectively, of SEQ ID NO:270. In one aspect, provided herein is an antibody that binds TRGV9, comprising a VH having an amino acid sequence of SEQ ID NO:269. In one aspect, provided herein is an antibody that binds TRGV9, comprising a VL having an amino acid sequence of SEQ ID NO:270. In one aspect, provided herein is an antibody that binds TRGV9, comprising a VH having an amino acid sequence of SEQ ID NO:269, and a VL having an amino acid sequence of SEQ ID NO:270. In one aspect, provided herein is an antibody that binds TRGV9, comprising a heavy chain having an amino acid sequence of SEQ ID NO:271. In one aspect, provided herein is an antibody that binds TRGV9, comprising a light chain having an amino acid sequence of SEQ ID NO:272. In one aspect, provided herein is an antibody that binds TRGV9, comprising a heavy chain having an amino acid sequence of SEQ ID NO:271, and a light chain having an amino acid sequence of SEQ ID NO:272. In one aspect, provided herein is an antibody that binds TRGV9, comprising a VH having an amino acid sequence having at least 95% identity to an amino acid sequence of SEQ ID NO:269. In one aspect, provided herein is an antibody that binds TRGV9, comprising a VL having an amino acid sequence having at least 95% identity to an amino acid sequence of SEQ ID NO:270. In one aspect, provided herein is an antibody that binds TRGV9, comprising a VH having an amino acid sequence having at least 95% identity to an amino acid sequence of SEQ ID NO:269, and a VL having an amino acid sequence having at least 95% identity to an amino acid sequence of SEQ ID NO:270. In one aspect, provided herein is an antibody that binds TRGV9, comprising a heavy chain having an amino acid sequence having at least 95% identity to an amino acid sequence of SEQ ID NO:271. In one aspect, provided herein is an antibody that binds TRGV9, comprising a light chain having an amino acid sequence having at least 95% identity to an amino acid sequence of SEQ ID NO:272. In one aspect, provided herein is an antibody that binds TRGV9, comprising a heavy chain having an amino acid sequence having at least 95% identity to an amino acid sequence of SEQ ID NO:271, and a light chain having an amino acid sequence having at least 95% identity to an amino acid sequence of SEQ ID NO:272.

[0107] In one aspect, provided herein is an antibody that binds TRGV9, comprising: (i) a VH comprising a VH CDR1, a VH CDR2, and a VH CDR3 having an amino acid sequence of SEQ ID NOs:273, 274, and 275, respectively, and (ii) a VL comprising a VL CDR1, VL CDR2, and VL CDR3 having an amino acid sequence of SEQ ID NOs:276, 277, and 278, respectively. In one aspect, provided herein is an antibody that binds TRGV9, comprising: (i) a VH comprising a VH CDR1, a VH CDR2, and a VH CDR3 having an amino acid sequence of SEQ ID NOs:279, 280, and 281, respectively, and (ii) a VL comprising a VL CDR1, VL CDR2, and VL CDR3 having an amino acid sequence of SEQ ID NOs:282, 283, and 284, respectively. In one aspect, provided herein is an antibody that binds TRGV9, comprising: (i) a VH comprising a VH CDR1, a VH CDR2, and a VH CDR3 having an amino acid sequence of SEQ ID NOs:285, 286, and 287, respectively, and (ii) a VL comprising a VL CDR1, VL CDR2, and VL CDR3 having an amino acid sequence of SEQ ID NOs:288, 289, and 290, respectively. In one aspect, provided herein is an antibody that binds TRGV9, comprising: (i) a VH comprising a VH CDR1, a VH CDR2, and a VH CDR3 having an amino acid sequence of SEQ ID NOs:291, 292, and 293, respectively, and (ii) a VL comprising a VL CDR1, VL CDR2, and VL CDR3 having an amino acid sequence of SEQ ID NOs:294, 295, and 296, respectively. In one aspect, provided herein is an antibody that binds TRGV9, comprising: (i) a VH comprising a VH CDR1, a VH CDR2, and a VH CDR3 having an amino acid sequence of SEQ ID NOs:297, 298, and 299, respectively, and (ii) a VL comprising a VL CDR1, VL CDR2, and VL CDR3 having an amino acid sequence of SEQ ID NOs:300, 301, and 302, respectively. In one aspect, provided herein is an antibody that binds TRGV9, comprising: (i) a VH comprising a VH CDR1, a VH CDR2, and a VH CDR3 having an amino acid sequence of a VH CDR1, a VH CDR2, and a VH CDR3, respectively, of a VH having an amino acid sequence of SEQ ID NO:303; and (ii) a VL comprising a VL CDR1, a VL CDR2, and a VL CDR3 having an amino acid sequence of a VL CDR1, a VL CDR2, and a VL CDR3, respectively, of SEQ ID NO:304. In one aspect, provided herein is an antibody that binds TRGV9, comprising a VH having an amino acid sequence of SEQ ID NO:303. In one aspect, provided herein is an antibody that binds TRGV9, comprising a VL having an amino acid sequence of SEQ ID NO:304. In one aspect, provided herein is an antibody that binds TRGV9, comprising a VH having an amino acid sequence of SEQ ID NO:303, and a VL having an amino acid sequence of SEQ ID NO:304. In one aspect, provided herein is an antibody that binds TRGV9, comprising a heavy chain having an amino acid sequence of SEQ ID NO:305. In one aspect, provided herein is an antibody that binds TRGV9, comprising a light chain having an amino acid sequence of SEQ ID NO:306. In one aspect, provided herein is an antibody that binds TRGV9, comprising a heavy chain having an amino acid sequence of SEQ ID NO:305, and a light chain having an amino acid sequence of SEQ ID NO:306. In one aspect, provided herein is an antibody that binds TRGV9, comprising a VH having an amino acid sequence having at least 95% identity to an amino acid sequence of SEQ ID NO:303. In one aspect, provided herein is an antibody that binds TRGV9, comprising a VL having an amino acid sequence having at least 95% identity to an amino acid sequence of SEQ ID NO:304. In one aspect, provided herein is an antibody that binds TRGV9, comprising a VH having an amino acid sequence having at least 95% identity to an amino acid sequence of SEQ ID NO:303, and a VL having an amino acid sequence having at least 95% identity to an amino acid sequence of SEQ ID NO:304. In one aspect, provided herein is an antibody that binds TRGV9, comprising a heavy chain having an amino acid sequence having at least 95% identity to an amino acid sequence of SEQ ID NO:305. In one aspect, provided herein is an antibody that binds TRGV9, comprising a light chain having an amino acid sequence having at least 95% identity to an amino acid sequence of SEQ ID NO:306. In one aspect, provided herein is an antibody that binds TRGV9, comprising a heavy chain having an amino acid sequence having at least 95% identity to an amino acid sequence of SEQ ID NO:305, and a light chain having an amino acid sequence having at least 95% identity to an amino acid sequence of SEQ ID NO:306.

[0108] In one aspect, provided herein is an antibody that binds TRGV9, comprising: (i) a VH comprising a VH CDR1, a VH CDR2, and a VH CDR3 having an amino acid sequence of SEQ ID NOs:307, 308, and 309, respectively, and (ii) a VL comprising a VL CDR1, VL CDR2, and VL CDR3 having an amino acid sequence of SEQ ID NOs:310, 311, and 312, respectively. In one aspect, provided herein is an antibody that binds TRGV9, comprising: (i) a VH comprising a VH CDR1, a VH CDR2, and a VH CDR3 having an amino acid sequence of SEQ ID NOs:313, 314, and 315, respectively, and (ii) a VL comprising a VL CDR1, VL CDR2, and VL CDR3 having an amino acid sequence of SEQ ID NOs:316, 317, and 318, respectively. In one aspect, provided herein is an antibody that binds TRGV9, comprising: (i) a VH comprising a VH CDR1, a VH CDR2, and a VH CDR3 having an amino acid sequence of SEQ ID NOs:319, 320, and 321, respectively, and (ii) a VL comprising a VL CDR1, VL CDR2, and VL CDR3 having an amino acid sequence of SEQ ID NOs:322, 323, and 324, respectively. In one aspect, provided herein is an antibody that binds TRGV9, comprising: (i) a VH comprising a VH CDR1, a VH CDR2, and a VH CDR3 having an amino acid sequence of SEQ ID NOs:325, 326, and 327, respectively, and (ii) a VL comprising a VL CDR1, VL CDR2, and VL CDR3 having an amino acid sequence of SEQ ID NOs:328, 329, and 330, respectively. In one aspect, provided herein is an antibody that binds TRGV9, comprising: (i) a VH comprising a VH CDR1, a VH CDR2, and a VH CDR3 having an amino acid sequence of SEQ ID NOs:331, 332, and 333, respectively, and (ii) a VL comprising a VL CDR1, VL CDR2, and VL CDR3 having an amino acid sequence of SEQ ID NOs:334, 335, and 336, respectively. In one aspect, provided herein is an antibody that binds TRGV9, comprising: (i) a VH comprising a VH CDR1, a VH CDR2, and a VH CDR3 having an amino acid sequence of a VH CDR1, a VH CDR2, and a VH CDR3, respectively, of a VH having an amino acid sequence of SEQ ID NO:337; and (ii) a VL comprising a VL CDR1, a VL CDR2, and a VL CDR3 having an amino acid sequence of a VL CDR1, a VL CDR2, and a VL CDR3, respectively, of SEQ ID NO:338. In one aspect, provided herein is an antibody that binds TRGV9, comprising a VH having an amino acid sequence of SEQ ID NO:337. In one aspect, provided herein is an antibody that binds TRGV9, comprising a VL having an amino acid sequence of SEQ ID NO:338. In one aspect, provided herein is an antibody that binds TRGV9, comprising a VH having an amino acid sequence of SEQ ID NO:337, and a VL having an amino acid sequence of SEQ ID NO:338. In one aspect, provided herein is an antibody that binds TRGV9, comprising a heavy chain having an amino acid sequence of SEQ ID NO:339. In one aspect, provided herein is an antibody that binds TRGV9, comprising a light chain having an amino acid sequence of SEQ ID NO:340. In one aspect, provided herein is an antibody that binds TRGV9, comprising a heavy chain having an amino acid sequence of SEQ ID NO:339, and a light chain having an amino acid sequence of SEQ ID NO:340. In one aspect, provided herein is an antibody that binds TRGV9, comprising a VH having an amino acid sequence having at least 95% identity to an amino acid sequence of SEQ ID NO:337. In one aspect, provided herein is an antibody that binds TRGV9, comprising a VL having an amino acid sequence having at least 95% identity to an amino acid sequence of SEQ ID NO:338. In one aspect, provided herein is an antibody that binds TRGV9, comprising a VH having an amino acid sequence having at least 95% identity to an amino acid sequence of SEQ ID NO:337, and a VL having an amino acid sequence having at least 95% identity to an amino acid sequence of SEQ ID NO:338. In one aspect, provided herein is an antibody that binds TRGV9, comprising a heavy chain having an amino acid sequence having at least 95% identity to an amino acid sequence of SEQ ID NO:339. In one aspect, provided herein is an antibody that binds TRGV9, comprising a light chain having an amino acid sequence having at least 95% identity to an amino acid sequence of SEQ ID NO:340. In one aspect, provided herein is an antibody that binds TRGV9, comprising a heavy chain having an amino acid sequence having at least 95% identity to an amino acid sequence of SEQ ID NO:339, and a light chain having an amino acid sequence having at least 95% identity to an amino acid sequence of SEQ ID NO:340.

[0109] In one aspect, provided herein is an antibody that binds TRGV9, comprising: (i) a VH comprising a VH CDR1, a VH CDR2, and a VH CDR3 having an amino acid sequence of SEQ ID NOs:341, 342, and 343, respectively, and (ii) a VL comprising a VL CDR1, VL CDR2, and VL CDR3 having an amino acid sequence of SEQ ID NOs:344, 345, and 346, respectively. In one aspect, provided herein is an antibody that binds TRGV9, comprising: (i) a VH comprising a VH CDR1, a VH CDR2, and a VH CDR3 having an amino acid sequence of SEQ ID NOs:347, 348, and 349, respectively, and (ii) a VL comprising a VL CDR1, VL CDR2, and VL CDR3 having an amino acid sequence of SEQ ID NOs:350, 351, and 352, respectively. In one aspect, provided herein is an antibody that binds TRGV9, comprising: (i) a VH comprising a VH CDR1, a VH CDR2, and a VH CDR3 having an amino acid sequence of SEQ ID NOs:353, 354, and 355, respectively, and (ii) a VL comprising a VL CDR1, VL CDR2, and VL CDR3 having an amino acid sequence of SEQ ID NOs:356, 357, and 358, respectively. In one aspect, provided herein is an antibody that binds TRGV9, comprising: (i) a VH comprising a VH CDR1, a VH CDR2, and a VH CDR3 having an amino acid sequence of SEQ ID NOs:359, 360, and 361, respectively, and (ii) a VL comprising a VL CDR1, VL CDR2, and VL CDR3 having an amino acid sequence of SEQ ID NOs:362, 363, and 364, respectively. In one aspect, provided herein is an antibody that binds TRGV9, comprising: (i) a VH comprising a VH CDR1, a VH CDR2, and a VH CDR3 having an amino acid sequence of SEQ ID NOs:365, 366, and 367, respectively, and (ii) a VL comprising a VL CDR1, VL CDR2, and VL CDR3 having an amino acid sequence of SEQ ID NOs:368, 369, and 370, respectively. In one aspect, provided herein is an antibody that binds TRGV9, comprising: (i) a VH comprising a VH CDR1, a VH CDR2, and a VH CDR3 having an amino acid sequence of a VH CDR1, a VH CDR2, and a VH CDR3, respectively, of a VH having an amino acid sequence of SEQ ID NO:371; and (ii) a VL comprising a VL CDR1, a VL CDR2, and a VL CDR3 having an amino acid sequence of a VL CDR1, a VL CDR2, and a VL CDR3, respectively, of SEQ ID NO:372. In one aspect, provided herein is an antibody that binds TRGV9, comprising a VH having an amino acid sequence of SEQ ID NO:371. In one aspect, provided herein is an antibody that binds TRGV9, comprising a VL having an amino acid sequence of SEQ ID NO:372. In one aspect, provided herein is an antibody that binds TRGV9, comprising a VH having an amino acid sequence of SEQ ID NO:371, and a VL having an amino acid sequence of SEQ ID NO:372. In one aspect, provided herein is an antibody that binds TRGV9, comprising a heavy chain having an amino acid sequence of SEQ ID NO:373. In one aspect, provided herein is an antibody that binds TRGV9, comprising a light chain having an amino acid sequence of SEQ ID NO:374. In one aspect, provided herein is an antibody that binds TRGV9, comprising a heavy chain having an amino acid sequence of SEQ ID NO:373, and a light chain having an amino acid sequence of SEQ ID NO:374. In one aspect, provided herein is an antibody that binds TRGV9, comprising a VH having an amino acid sequence having at least 95% identity to an amino acid sequence of SEQ ID NO:371. In one aspect, provided herein is an antibody that binds TRGV9, comprising a VL having an amino acid sequence having at least 95% identity to an amino acid sequence of SEQ ID NO:372. In one aspect, provided herein is an antibody that binds TRGV9, comprising a VH having an amino acid sequence having at least 95% identity to an amino acid sequence of SEQ ID NO:371, and a VL having an amino acid sequence having at least 95% identity to an amino acid sequence of SEQ ID NO:372. In one aspect, provided herein is an antibody that binds TRGV9, comprising a heavy chain having an amino acid sequence having at least 95% identity to an amino acid sequence of SEQ ID NO:373. In one aspect, provided herein is an antibody that binds TRGV9, comprising a light chain having an amino acid sequence having at least 95% identity to an amino acid sequence of SEQ ID NO:374. In one aspect, provided herein is an antibody that binds TRGV9, comprising a heavy chain having an amino acid sequence having at least 95% identity to an amino acid sequence of SEQ ID NO:373, and a light chain having an amino acid sequence having at least 95% identity to an amino acid sequence of SEQ ID NO:374.

[0110] In one aspect, provided herein is an antibody that binds TRGV9, comprising: (i) a VH comprising a VH CDR1, a VH CDR2, and a VH CDR3 having an amino acid sequence of SEQ ID NOs:375, 376, and 377, respectively, and (ii) a VL comprising a VL CDR1, VL CDR2, and VL CDR3 having an amino acid sequence of SEQ ID NOs:378, 379, and 380, respectively. In one aspect, provided herein is an antibody that binds TRGV9, comprising: (i) a VH comprising a VH CDR1, a VH CDR2, and a VH CDR3 having an amino acid sequence of SEQ ID NOs:381, 382, and 383, respectively, and (ii) a VL comprising a VL CDR1, VL CDR2, and VL CDR3 having an amino acid sequence of SEQ ID NOs:384, 385, and 386, respectively. In one aspect, provided herein is an antibody that binds TRGV9, comprising: (i) a VH comprising a VH CDR1, a VH CDR2, and a VH CDR3 having an amino acid sequence of SEQ ID NOs:387, 388, and 389, respectively, and (ii) a VL comprising a VL CDR1, VL CDR2, and VL CDR3 having an amino acid sequence of SEQ ID NOs:390, 391, and 392, respectively. In one aspect, provided herein is an antibody that binds TRGV9, comprising: (i) a VH comprising a VH CDR1, a VH CDR2, and a VH CDR3 having an amino acid sequence of SEQ ID NOs:393, 394, and 395, respectively, and (ii) a VL comprising a VL CDR1, VL CDR2, and VL CDR3 having an amino acid sequence of SEQ ID NOs:396, 397, and 398, respectively. In one aspect, provided herein is an antibody that binds TRGV9, comprising: (i) a VH comprising a VH CDR1, a VH CDR2, and a VH CDR3 having an amino acid sequence of SEQ ID NOs:399, 400, and 401, respectively, and (ii) a VL comprising a VL CDR1, VL CDR2, and VL CDR3 having an amino acid sequence of SEQ ID NOs:402, 403, and 404, respectively. In one aspect, provided herein is an antibody that binds TRGV9, comprising: (i) a VH comprising a VH CDR1, a VH CDR2, and a VH CDR3 having an amino acid sequence of a VH CDR1, a VH CDR2, and a VH CDR3, respectively, of a VH having an amino acid sequence of SEQ ID NO:405; and (ii) a VL comprising a VL CDR1, a VL CDR2, and a VL CDR3 having an amino acid sequence of a VL CDR1, a VL CDR2, and a VL CDR3, respectively, of SEQ ID NO:406. In one aspect, provided herein is an antibody that binds TRGV9, comprising a VH having an amino acid sequence of SEQ ID NO:405. In one aspect, provided herein is an antibody that binds TRGV9, comprising a VL having an amino acid sequence of SEQ ID NO:406. In one aspect, provided herein is an antibody that binds TRGV9, comprising a VH having an amino acid sequence of SEQ ID NO:405, and a VL having an amino acid sequence of SEQ ID NO:406. In one aspect, provided herein is an antibody that binds TRGV9, comprising a heavy chain having an amino acid sequence of SEQ ID NO:407. In one aspect, provided herein is an antibody that binds TRGV9, comprising a light chain having an amino acid sequence of SEQ ID NO:408. In one aspect, provided herein is an antibody that binds TRGV9, comprising a heavy chain having an amino acid sequence of SEQ ID NO:407, and a light chain having an amino acid sequence of SEQ ID NO:408. In one aspect, provided herein is an antibody that binds TRGV9, comprising a VH having an amino acid sequence having at least 95% identity to an amino acid sequence of SEQ ID NO:405. In one aspect, provided herein is an antibody that binds TRGV9, comprising a VL having an amino acid sequence having at least 95% identity to an amino acid sequence of SEQ ID NO:406. In one aspect, provided herein is an antibody that binds TRGV9, comprising a VH having an amino acid sequence having at least 95% identity to an amino acid sequence of SEQ ID NO:405, and a VL having an amino acid sequence having at least 95% identity to an amino acid sequence of SEQ ID NO:406. In one aspect, provided herein is an antibody that binds TRGV9, comprising a heavy chain having an amino acid sequence having at least 95% identity to an amino acid sequence of SEQ ID NO:407. In one aspect, provided herein is an antibody that binds TRGV9, comprising a light chain having an amino acid sequence having at least 95% identity to an amino acid sequence of SEQ ID NO:408. In one aspect, provided herein is an antibody that binds TRGV9, comprising a heavy chain having an amino acid sequence having at least 95% identity to an amino acid sequence of SEQ ID NO:407, and a light chain having an amino acid sequence having at least 95% identity to an amino acid sequence of SEQ ID NO:408.

[0111] In one aspect, provided herein is an antibody that binds TRGV9, comprising: (i) a VH comprising a VH CDR1, a VH CDR2, and a VH CDR3 having an amino acid sequence of SEQ ID NOs:409, 410, and 411, respectively, and (ii) a VL comprising a VL CDR1, VL CDR2, and VL CDR3 having an amino acid sequence of SEQ ID NOs:412, 413, and 414, respectively. In one aspect, provided herein is an antibody that binds TRGV9, comprising: (i) a VH comprising a VH CDR1, a VH CDR2, and a VH CDR3 having an amino acid sequence of SEQ ID NOs:415, 416, and 417, respectively, and (ii) a VL comprising a VL CDR1, VL CDR2, and VL CDR3 having an amino acid sequence of SEQ ID NOs:418, 419, and 420, respectively. In one aspect, provided herein is an antibody that binds TRGV9, comprising: (i) a VH comprising a VH CDR1, a VH CDR2, and a VH CDR3 having an amino acid sequence of SEQ ID NOs:421, 422, and 423, respectively, and (ii) a VL comprising a VL CDR1, VL CDR2, and VL CDR3 having an amino acid sequence of SEQ ID NOs:424, 425, and 426, respectively. In one aspect, provided herein is an antibody that binds TRGV9, comprising: (i) a VH comprising a VH CDR1, a VH CDR2, and a VH CDR3 having an amino acid sequence of SEQ ID NOs:427, 428, and 429, respectively, and (ii) a VL comprising a VL CDR1, VL CDR2, and VL CDR3 having an amino acid sequence of SEQ ID NOs:430, 431, and 432, respectively. In one aspect, provided herein is an antibody that binds TRGV9, comprising: (i) a VH comprising a VH CDR1, a VH CDR2, and a VH CDR3 having an amino acid sequence of SEQ ID NOs:433, 434, and 435, respectively, and (ii) a VL comprising a VL CDR1, VL CDR2, and VL CDR3 having an amino acid sequence of SEQ ID NOs:436, 437, and 438, respectively. In one aspect, provided herein is an antibody that binds TRGV9, comprising: (i) a VH comprising a VH CDR1, a VH CDR2, and a VH CDR3 having an amino acid sequence of a VH CDR1, a VH CDR2, and a VH CDR3, respectively, of a VH having an amino acid sequence of SEQ ID NO:439; and (ii) a VL comprising a VL CDR1, a VL CDR2, and a VL CDR3 having an amino acid sequence of a VL CDR1, a VL CDR2, and a VL CDR3, respectively, of SEQ ID NO:440. In one aspect, provided herein is an antibody that binds TRGV9, comprising a VH having an amino acid sequence of SEQ ID NO:439. In one aspect, provided herein is an antibody that binds TRGV9, comprising a VL having an amino acid sequence of SEQ ID NO:440. In one aspect, provided herein is an antibody that binds TRGV9, comprising a VH having an amino acid sequence of SEQ ID NO:439, and a VL having an amino acid sequence of SEQ ID NO:440. In one aspect, provided herein is an antibody that binds TRGV9, comprising a heavy chain having an amino acid sequence of SEQ ID NO:441. In one aspect, provided herein is an antibody that binds TRGV9, comprising a light chain having an amino acid sequence of SEQ ID NO:442. In one aspect, provided herein is an antibody that binds TRGV9, comprising a heavy chain having an amino acid sequence of SEQ ID NO:441, and a light chain having an amino acid sequence of SEQ ID NO:442. In one aspect, provided herein is an antibody that binds TRGV9, comprising a VH having an amino acid sequence having at least 95% identity to an amino acid sequence of SEQ ID NO:439. In one aspect, provided herein is an antibody that binds TRGV9, comprising a VL having an amino acid sequence having at least 95% identity to an amino acid sequence of SEQ ID NO:440. In one aspect, provided herein is an antibody that binds TRGV9, comprising a VH having an amino acid sequence having at least 95% identity to an amino acid sequence of SEQ ID NO:439, and a VL having an amino acid sequence having at least 95% identity to an amino acid sequence of SEQ ID NO:440. In one aspect, provided herein is an antibody that binds TRGV9, comprising a heavy chain having an amino acid sequence having at least 95% identity to an amino acid sequence of SEQ ID NO:441. In one aspect, provided herein is an antibody that binds TRGV9, comprising a light chain having an amino acid sequence having at least 95% identity to an amino acid sequence of SEQ ID NO:442. In one aspect, provided herein is an antibody that binds TRGV9, comprising a heavy chain having an amino acid sequence having at least 95% identity to an amino acid sequence of SEQ ID NO:441, and a light chain having an amino acid sequence having at least 95% identity to an amino acid sequence of SEQ ID NO:442.

[0112] In one aspect, provided herein is an antibody that binds TRGV9, comprising: (i) a VH comprising a VH CDR1, a VH CDR2, and a VH CDR3 having an amino acid sequence of SEQ ID NOs:443, 444, and 445, respectively, and (ii) a VL comprising a VL CDR1, VL CDR2, and VL CDR3 having an amino acid sequence of SEQ ID NOs:446, 447, and 448, respectively. In one aspect, provided herein is an antibody that binds TRGV9, comprising: (i) a VH comprising a VH CDR1, a VH CDR2, and a VH CDR3 having an amino acid sequence of SEQ ID NOs:449, 450, and 451, respectively, and (ii) a VL comprising a VL CDR1, VL CDR2, and VL CDR3 having an amino acid sequence of SEQ ID NOs:452, 453, and 454, respectively. In one aspect, provided herein is an antibody that binds TRGV9, comprising: (i) a VH comprising a VH CDR1, a VH CDR2, and a VH CDR3 having an amino acid sequence of SEQ ID NOs:455, 456, and 457, respectively, and (ii) a VL comprising a VL CDR1, VL CDR2, and VL CDR3 having an amino acid sequence of SEQ ID NOs:458, 459, and 460, respectively. In one aspect, provided herein is an antibody that binds TRGV9, comprising: (i) a VH comprising a VH CDR1, a VH CDR2, and a VH CDR3 having an amino acid sequence of SEQ ID NOs:461, 462, and 463, respectively, and (ii) a VL comprising a VL CDR1, VL CDR2, and VL CDR3 having an amino acid sequence of SEQ ID NOs:464, 465, and 466, respectively. In one aspect, provided herein is an antibody that binds TRGV9, comprising: (i) a VH comprising a VH CDR1, a VH CDR2, and a VH CDR3 having an amino acid sequence of SEQ ID NOs:467, 468, and 469, respectively, and (ii) a VL comprising a VL CDR1, VL CDR2, and VL CDR3 having an amino acid sequence of SEQ ID NOs:470, 471, and 472, respectively. In one aspect, provided herein is an antibody that binds TRGV9, comprising: (i) a VH comprising a VH CDR1, a VH CDR2, and a VH CDR3 having an amino acid sequence of a VH CDR1, a VH CDR2, and a VH CDR3, respectively, of a VH having an amino acid sequence of SEQ ID NO:473; and (ii) a VL comprising a VL CDR1, a VL CDR2, and a VL CDR3 having an amino acid sequence of a VL CDR1, a VL CDR2, and a VL CDR3, respectively, of SEQ ID NO:474. In one aspect, provided herein is an antibody that binds TRGV9, comprising a VH having an amino acid sequence of SEQ ID NO:473. In one aspect, provided herein is an antibody that binds TRGV9, comprising a VL having an amino acid sequence of SEQ ID NO:474. In one aspect, provided herein is an antibody that binds TRGV9, comprising a VH having an amino acid sequence of SEQ ID NO:473, and a VL having an amino acid sequence of SEQ ID NO:474. In one aspect, provided herein is an antibody that binds TRGV9, comprising a heavy chain having an amino acid sequence of SEQ ID NO:475. In one aspect, provided herein is an antibody that binds TRGV9, comprising a light chain having an amino acid sequence of SEQ ID NO:476. In one aspect, provided herein is an antibody that binds TRGV9, comprising a heavy chain having an amino acid sequence of SEQ ID NO:475, and a light chain having an amino acid sequence of SEQ ID NO:476. In one aspect, provided herein is an antibody that binds TRGV9, comprising a VH having an amino acid sequence having at least 95% identity to an amino acid sequence of SEQ ID NO:473. In one aspect, provided herein is an antibody that binds TRGV9, comprising a VL having an amino acid sequence having at least 95% identity to an amino acid sequence of SEQ ID NO:474. In one aspect, provided herein is an antibody that binds TRGV9, comprising a VH having an amino acid sequence having at least 95% identity to an amino acid sequence of SEQ ID NO:473, and a VL having an amino acid sequence having at least 95% identity to an amino acid sequence of SEQ ID NO:474. In one aspect, provided herein is an antibody that binds TRGV9, comprising a heavy chain having an amino acid sequence having at least 95% identity to an amino acid sequence of SEQ ID NO:475. In one aspect, provided herein is an antibody that binds TRGV9, comprising a light chain having an amino acid sequence having at least 95% identity to an amino acid sequence of SEQ ID NO:476. In one aspect, provided herein is an antibody that binds TRGV9, comprising a heavy chain having an amino acid sequence having at least 95% identity to an amino acid sequence of SEQ ID NO:475, and a light chain having an amino acid sequence having at least 95% identity to an amino acid sequence of SEQ ID NO:476.

[0113] In one aspect, provided herein is an antibody that binds TRGV9, comprising: (i) a VH comprising a VH CDR1, a VH CDR2, and a VH CDR3 having an amino acid sequence of SEQ ID NOs:477, 478, and 479, respectively, and (ii) a VL comprising a VL CDR1, VL CDR2, and VL CDR3 having an amino acid sequence of SEQ ID NOs:480, 481, and 482, respectively. In one aspect, provided herein is an antibody that binds TRGV9, comprising: (i) a VH comprising a VH CDR1, a VH CDR2, and a VH CDR3 having an amino acid sequence of SEQ ID NOs:483, 484, and 485, respectively, and (ii) a VL comprising a VL CDR1, VL CDR2, and VL CDR3 having an amino acid sequence of SEQ ID NOs:486, 487, and 488, respectively. In one aspect, provided herein is an antibody that binds TRGV9, comprising: (i) a VH comprising a VH CDR1, a VH CDR2, and a VH CDR3 having an amino acid sequence of SEQ ID NOs:489, 490, and 491, respectively, and (ii) a VL comprising a VL CDR1, VL CDR2, and VL CDR3 having an amino acid sequence of SEQ ID NOs:492, 493, and 494, respectively. In one aspect, provided herein is an antibody that binds TRGV9, comprising: (i) a VH comprising a VH CDR1, a VH CDR2, and a VH CDR3 having an amino acid sequence of SEQ ID NOs:495, 496, and 497, respectively, and (ii) a VL comprising a VL CDR1, VL CDR2, and VL CDR3 having an amino acid sequence of SEQ ID NOs:498, 499, and 500, respectively. In one aspect, provided herein is an antibody that binds TRGV9, comprising: (i) a VH comprising a VH CDR1, a VH CDR2, and a VH CDR3 having an amino acid sequence of SEQ ID NOs:501, 502, and 503, respectively, and (ii) a VL comprising a VL CDR1, VL CDR2, and VL CDR3 having an amino acid sequence of SEQ ID NOs:504, 505, and 506, respectively. In one aspect, provided herein is an antibody that binds TRGV9, comprising: (i) a VH comprising a VH CDR1, a VH CDR2, and a VH CDR3 having an amino acid sequence of a VH CDR1, a VH CDR2, and a VH CDR3, respectively, of a VH having an amino acid sequence of SEQ ID NO:507; and (ii) a VL comprising a VL CDR1, a VL CDR2, and a VL CDR3 having an amino acid sequence of a VL CDR1, a VL CDR2, and a VL CDR3, respectively, of SEQ ID NO:508. In one aspect, provided herein is an antibody that binds TRGV9, comprising a VH having an amino acid sequence of SEQ ID NO:507. In one aspect, provided herein is an antibody that binds TRGV9, comprising a VL having an amino acid sequence of SEQ ID NO:508. In one aspect, provided herein is an antibody that binds TRGV9, comprising a VH having an amino acid sequence of SEQ ID NO:507, and a VL having an amino acid sequence of SEQ ID NO:508. In one aspect, provided herein is an antibody that binds TRGV9, comprising a heavy chain having an amino acid sequence of SEQ ID NO:509. In one aspect, provided herein is an antibody that binds TRGV9, comprising a light chain having an amino acid sequence of SEQ ID NO:510. In one aspect, provided herein is an antibody that binds TRGV9, comprising a heavy chain having an amino acid sequence of SEQ ID NO:509, and a light chain having an amino acid sequence of SEQ ID NO:510. In one aspect, provided herein is an antibody that binds TRGV9, comprising a VH having an amino acid sequence having at least 95% identity to an amino acid sequence of SEQ ID NO:507. In one aspect, provided herein is an antibody that binds TRGV9, comprising a VL having an amino acid sequence having at least 95% identity to an amino acid sequence of SEQ ID NO:508. In one aspect, provided herein is an antibody that binds TRGV9, comprising a VH having an amino acid sequence having at least 95% identity to an amino acid sequence of SEQ ID NO:507, and a VL having an amino acid sequence having at least 95% identity to an amino acid sequence of SEQ ID NO:508. In one aspect, provided herein is an antibody that binds TRGV9, comprising a heavy chain having an amino acid sequence having at least 95% identity to an amino acid sequence of SEQ ID NO:509. In one aspect, provided herein is an antibody that binds TRGV9, comprising a light chain having an amino acid sequence having at least 95% identity to an amino acid sequence of SEQ ID NO:510. In one aspect, provided herein is an antibody that binds TRGV9, comprising a heavy chain having an amino acid sequence having at least 95% identity to an amino acid sequence of SEQ ID NO:509, and a light chain having an amino acid sequence having at least 95% identity to an amino acid sequence of SEQ ID NO:510.

[0114] In one aspect, provided herein is an antibody that binds TRGV9, comprising: (i) a VH comprising a VH CDR1, a VH CDR2, and a VH CDR3 having an amino acid sequence of SEQ ID NOs:511, 512, and 513, respectively, and (ii) a VL comprising a VL CDR1, VL CDR2, and VL CDR3 having an amino acid sequence of SEQ ID NOs:514, 515, and 516, respectively. In one aspect, provided herein is an antibody that binds TRGV9, comprising: (i) a VH comprising a VH CDR1, a VH CDR2, and a VH CDR3 having an amino acid sequence of SEQ ID NOs:517, 518, and 519, respectively, and (ii) a VL comprising a VL CDR1, VL CDR2, and VL CDR3 having an amino acid sequence of SEQ ID NOs:520, 521, and 522, respectively. In one aspect, provided herein is an antibody that binds TRGV9, comprising: (i) a VH comprising a VH CDR1, a VH CDR2, and a VH CDR3 having an amino acid sequence of SEQ ID NOs:523, 524, and 525, respectively, and (ii) a VL comprising a VL CDR1, VL CDR2, and VL CDR3 having an amino acid sequence of SEQ ID NOs:526, 527, and 528, respectively. In one aspect, provided herein is an antibody that binds TRGV9, comprising: (i) a VH comprising a VH CDR1, a VH CDR2, and a VH CDR3 having an amino acid sequence of SEQ ID NOs:529, 530, and 531, respectively, and (ii) a VL comprising a VL CDR1, VL CDR2, and VL CDR3 having an amino acid sequence of SEQ ID NOs:532, 533, and 534, respectively. In one aspect, provided herein is an antibody that binds TRGV9, comprising: (i) a VH comprising a VH CDR1, a VH CDR2, and a VH CDR3 having an amino acid sequence of SEQ ID NOs:535, 536, and 537, respectively, and (ii) a VL comprising a VL CDR1, VL CDR2, and VL CDR3 having an amino acid sequence of SEQ ID NOs:538, 539, and 540, respectively. In one aspect, provided herein is an antibody that binds TRGV9, comprising: (i) a VH comprising a VH CDR1, a VH CDR2, and a VH CDR3 having an amino acid sequence of a VH CDR1, a VH CDR2, and a VH CDR3, respectively, of a VH having an amino acid sequence of SEQ ID NO:541; and (ii) a VL comprising a VL CDR1, a VL CDR2, and a VL CDR3 having an amino acid sequence of a VL CDR1, a VL CDR2, and a VL CDR3, respectively, of SEQ ID NO:542. In one aspect, provided herein is an antibody that binds TRGV9, comprising a VH having an amino acid sequence of SEQ ID NO:541. In one aspect, provided herein is an antibody that binds TRGV9, comprising a VL having an amino acid sequence of SEQ ID NO:542. In one aspect, provided herein is an antibody that binds TRGV9, comprising a VH having an amino acid sequence of SEQ ID NO:541, and a VL having an amino acid sequence of SEQ ID NO:542. In one aspect, provided herein is an antibody that binds TRGV9, comprising a heavy chain having an amino acid sequence of SEQ ID NO:543. In one aspect, provided herein is an antibody that binds TRGV9, comprising a light chain having an amino acid sequence of SEQ ID NO:544. In one aspect, provided herein is an antibody that binds TRGV9, comprising a heavy chain having an amino acid sequence of SEQ ID NO:543, and a light chain having an amino acid sequence of SEQ ID NO:544. In one aspect, provided herein is an antibody that binds TRGV9, comprising a VH having an amino acid sequence having at least 95% identity to an amino acid sequence of SEQ ID NO:541. In one aspect, provided herein is an antibody that binds TRGV9, comprising a VL having an amino acid sequence having at least 95% identity to an amino acid sequence of SEQ ID NO:542. In one aspect, provided herein is an antibody that binds TRGV9, comprising a VH having an amino acid sequence having at least 95% identity to an amino acid sequence of SEQ ID NO:541, and a VL having an amino acid sequence having at least 95% identity to an amino acid sequence of SEQ ID NO:542. In one aspect, provided herein is an antibody that binds TRGV9, comprising a heavy chain having an amino acid sequence having at least 95% identity to an amino acid sequence of SEQ ID NO:543. In one aspect, provided herein is an antibody that binds TRGV9, comprising a light chain having an amino acid sequence having at least 95% identity to an amino acid sequence of SEQ ID NO:544. In one aspect, provided herein is an antibody that binds TRGV9, comprising a heavy chain having an amino acid sequence having at least 95% identity to an amino acid sequence of SEQ ID NO:543, and a light chain having an amino acid sequence having at least 95% identity to an amino acid sequence of SEQ ID NO:544.

[0115] In one aspect, provided herein is an antibody that binds TRGV9, comprising: (i) a VH comprising a VH CDR1, a VH CDR2, and a VH CDR3 having an amino acid sequence of SEQ ID NOs:545, 546, and 547, respectively, and (ii) a VL comprising a VL CDR1, VL CDR2, and VL CDR3 having an amino acid sequence of SEQ ID NOs:548,549, and 550, respectively. In one aspect, provided herein is an antibody that binds TRGV9, comprising: (i) a VH comprising a VH CDR1, a VH CDR2, and a VH CDR3 having an amino acid sequence of SEQ ID NOs:551, 552, and 553, respectively, and (ii) a VL comprising a VL CDR1, VL CDR2, and VL CDR3 having an amino acid sequence of SEQ ID NOs:554, 555, and 556, respectively. In one aspect, provided herein is an antibody that binds TRGV9, comprising: (i) a VH comprising a VH CDR1, a VH CDR2, and a VH CDR3 having an amino acid sequence of SEQ ID NOs:557, 558, and 559, respectively, and (ii) a VL comprising a VL CDR1, VL CDR2, and VL CDR3 having an amino acid sequence of SEQ ID NOs:560, 561, and 562, respectively. In one aspect, provided herein is an antibody that binds TRGV9, comprising: (i) a VH comprising a VH CDR1, a VH CDR2, and a VH CDR3 having an amino acid sequence of SEQ ID NOs:563, 564, and 565, respectively, and (ii) a VL comprising a VL CDR1, VL CDR2, and VL CDR3 having an amino acid sequence of SEQ ID NOs:566, 567, and 568, respectively. In one aspect, provided herein is an antibody that binds TRGV9, comprising: (i) a VH comprising a VH CDR1, a VH CDR2, and a VH CDR3 having an amino acid sequence of SEQ ID NOs:569, 570, and 571, respectively, and (ii) a VL comprising a VL CDR1, VL CDR2, and VL CDR3 having an amino acid sequence of SEQ ID NOs:572, 573, and 574, respectively. In one aspect, provided herein is an antibody that binds TRGV9, comprising: (i) a VH comprising a VH CDR1, a VH CDR2, and a VH CDR3 having an amino acid sequence of a VH CDR1, a VH CDR2, and a VH CDR3, respectively, of a VH having an amino acid sequence of SEQ ID NO:575; and (ii) a VL comprising a VL CDR1, a VL CDR2, and a VL CDR3 having an amino acid sequence of a VL CDR1, a VL CDR2, and a VL CDR3, respectively, of SEQ ID NO:576. In one aspect, provided herein is an antibody that binds TRGV9, comprising a VH having an amino acid sequence of SEQ ID NO:575. In one aspect, provided herein is an antibody that binds TRGV9, comprising a VL having an amino acid sequence of SEQ ID NO:576. In one aspect, provided herein is an antibody that binds TRGV9, comprising a VH having an amino acid sequence of SEQ ID NO:575, and a VL having an amino acid sequence of SEQ ID NO:576. In one aspect, provided herein is an antibody that binds TRGV9, comprising a heavy chain having an amino acid sequence of SEQ ID NO:577. In one aspect, provided herein is an antibody that binds TRGV9, comprising a light chain having an amino acid sequence of SEQ ID NO:578. In one aspect, provided herein is an antibody that binds TRGV9, comprising a heavy chain having an amino acid sequence of SEQ ID NO:577, and a light chain having an amino acid sequence of SEQ ID NO:578. In one aspect, provided herein is an antibody that binds TRGV9, comprising a VH having an amino acid sequence having at least 95% identity to an amino acid sequence of SEQ ID NO:575. In one aspect, provided herein is an antibody that binds TRGV9, comprising a VL having an amino acid sequence having at least 95% identity to an amino acid sequence of SEQ ID NO:576. In one aspect, provided herein is an antibody that binds TRGV9, comprising a VH having an amino acid sequence having at least 95% identity to an amino acid sequence of SEQ ID NO:575, and a VL having an amino acid sequence having at least 95% identity to an amino acid sequence of SEQ ID NO:576. In one aspect, provided herein is an antibody that binds TRGV9, comprising a heavy chain having an amino acid sequence having at least 95% identity to an amino acid sequence of SEQ ID NO:577. In one aspect, provided herein is an antibody that binds TRGV9, comprising a light chain having an amino acid sequence having at least 95% identity to an amino acid sequence of SEQ ID NO:578. In one aspect, provided herein is an antibody that binds TRGV9, comprising a heavy chain having an amino acid sequence having at least 95% identity to an amino acid sequence of SEQ ID NO:577, and a light chain having an amino acid sequence having at least 95% identity to an amino acid sequence of SEQ ID NO:578.

[0116] In one aspect, provided herein is an antibody that binds TRGV9, comprising: (i) a VH comprising a VH CDR1, a VH CDR2, and a VH CDR3 having an amino acid sequence of SEQ ID NOs:579, 580, and 581, respectively, and (ii) a VL comprising a VL CDR1, VL CDR2, and VL CDR3 having an amino acid sequence of SEQ ID NOs:582, 583, and 584, respectively. In one aspect, provided herein is an antibody that binds TRGV9, comprising: (i) a VH comprising a VH CDR1, a VH CDR2, and a VH CDR3 having an amino acid sequence of SEQ ID NOs:585, 586, and 587, respectively, and (ii) a VL comprising a VL CDR1, VL CDR2, and VL CDR3 having an amino acid sequence of SEQ ID NOs:588, 589, and 590, respectively. In one aspect, provided herein is an antibody that binds TRGV9, comprising: (i) a VH comprising a VH CDR1, a VH CDR2, and a VH CDR3 having an amino acid sequence of SEQ ID NOs:591, 592, and 593, respectively, and (ii) a VL comprising a VL CDR1, VL CDR2, and VL CDR3 having an amino acid sequence of SEQ ID NOs:594, 595, and 596, respectively. In one aspect, provided herein is an antibody that binds TRGV9, comprising: (i) a VH comprising a VH CDR1, a VH CDR2, and a VH CDR3 having an amino acid sequence of SEQ ID NOs:597, 598, and 599, respectively, and (ii) a VL comprising a VL CDR1, VL CDR2, and VL CDR3 having an amino acid sequence of SEQ ID NOs:600, 601, and 602, respectively. In one aspect, provided herein is an antibody that binds TRGV9, comprising: (i) a VH comprising a VH CDR1, a VH CDR2, and a VH CDR3 having an amino acid sequence of SEQ ID NOs:603, 604, and 605, respectively, and (ii) a VL comprising a VL CDR1, VL CDR2, and VL CDR3 having an amino acid sequence of SEQ ID NOs:606, 607, and 608, respectively. In one aspect, provided herein is an antibody that binds TRGV9, comprising: (i) a VH comprising a VH CDR1, a VH CDR2, and a VH CDR3 having an amino acid sequence of a VH CDR1, a VH CDR2, and a VH CDR3, respectively, of a VH having an amino acid sequence of SEQ ID NO:609; and (ii) a VL comprising a VL CDR1, a VL CDR2, and a VL CDR3 having an amino acid sequence of a VL CDR1, a VL CDR2, and a VL CDR3, respectively, of SEQ ID NO:610. In one aspect, provided herein is an antibody that binds TRGV9, comprising a VH having an amino acid sequence of SEQ ID NO:609. In one aspect, provided herein is an antibody that binds TRGV9, comprising a VL having an amino acid sequence of SEQ ID NO:610. In one aspect, provided herein is an antibody that binds TRGV9, comprising a VH having an amino acid sequence of SEQ ID NO:609, and a VL having an amino acid sequence of SEQ ID NO:610. In one aspect, provided herein is an antibody that binds TRGV9, comprising a heavy chain having an amino acid sequence of SEQ ID NO:611. In one aspect, provided herein is an antibody that binds TRGV9, comprising a light chain having an amino acid sequence of SEQ ID NO:612. In one aspect, provided herein is an antibody that binds TRGV9, comprising a heavy chain having an amino acid sequence of SEQ ID NO:611, and a light chain having an amino acid sequence of SEQ ID NO:612. In one aspect, provided herein is an antibody that binds TRGV9, comprising a VH having an amino acid sequence having at least 95% identity to an amino acid sequence of SEQ ID NO:609. In one aspect, provided herein is an antibody that binds TRGV9, comprising a VL having an amino acid sequence having at least 95% identity to an amino acid sequence of SEQ ID NO:610. In one aspect, provided herein is an antibody that binds TRGV9, comprising a VH having an amino acid sequence having at least 95% identity to an amino acid sequence of SEQ ID NO:609, and a VL having an amino acid sequence having at least 95% identity to an amino acid sequence of SEQ ID NO:610. In one aspect, provided herein is an antibody that binds TRGV9, comprising a heavy chain having an amino acid sequence having at least 95% identity to an amino acid sequence of SEQ ID NO:611. In one aspect, provided herein is an antibody that binds TRGV9, comprising a light chain having an amino acid sequence having at least 95% identity to an amino acid sequence of SEQ ID NO:612. In one aspect, provided herein is an antibody that binds TRGV9, comprising a heavy chain having an amino acid sequence having at least 95% identity to an amino acid sequence of SEQ ID NO:611, and a light chain having an amino acid sequence having at least 95% identity to an amino acid sequence of SEQ ID NO:612.

[0117] In one aspect, provided herein is an antibody that binds TRGV9, comprising: (i) a VH comprising a VH CDR1, a VH CDR2, and a VH CDR3 having an amino acid sequence of SEQ ID NOs:613, 614, and 615, respectively, and (ii) a VL comprising a VL CDR1, VL CDR2, and VL CDR3 having an amino acid sequence of SEQ ID NOs:616, 617, and 618, respectively. In one aspect, provided herein is an antibody that binds TRGV9, comprising: (i) a VH comprising a VH CDR1, a VH CDR2, and a VH CDR3 having an amino acid sequence of SEQ ID NOs:619, 620, and 621, respectively, and (ii) a VL comprising a VL CDR1, VL CDR2, and VL CDR3 having an amino acid sequence of SEQ ID NOs:622, 523, and 624, respectively. In one aspect, provided herein is an antibody that binds TRGV9, comprising: (i) a VH comprising a VH CDR1, a VH CDR2, and a VH CDR3 having an amino acid sequence of SEQ ID NOs:625, 626, and 627, respectively, and (ii) a VL comprising a VL CDR1, VL CDR2, and VL CDR3 having an amino acid sequence of SEQ ID NOs:628, 629, and 630, respectively. In one aspect, provided herein is an antibody that binds TRGV9, comprising: (i) a VH comprising a VH CDR1, a VH CDR2, and a VH CDR3 having an amino acid sequence of SEQ ID NOs:631, 632, and 633, respectively, and (ii) a VL comprising a VL CDR1, VL CDR2, and VL CDR3 having an amino acid sequence of SEQ ID NOs:634, 635, and 636, respectively. In one aspect, provided herein is an antibody that binds TRGV9, comprising: (i) a VH comprising a VH CDR1, a VH CDR2, and a VH CDR3 having an amino acid sequence of SEQ ID NOs:637, 638, and 639, respectively, and (ii) a VL comprising a VL CDR1, VL CDR2, and VL CDR3 having an amino acid sequence of SEQ ID NOs:640, 641, and 642, respectively. In one aspect, provided herein is an antibody that binds TRGV9, comprising: (i) a VH comprising a VH CDR1, a VH CDR2, and a VH CDR3 having an amino acid sequence of a VH CDR1, a VH CDR2, and a VH CDR3, respectively, of a VH having an amino acid sequence of SEQ ID NO:643; and (ii) a VL comprising a VL CDR1, a VL CDR2, and a VL CDR3 having an amino acid sequence of a VL CDR1, a VL CDR2, and a VL CDR3, respectively, of SEQ ID NO:644. In one aspect, provided herein is an antibody that binds TRGV9, comprising a VH having an amino acid sequence of SEQ ID NO:643. In one aspect, provided herein is an antibody that binds TRGV9, comprising a VL having an amino acid sequence of SEQ ID NO:644. In one aspect, provided herein is an antibody that binds TRGV9, comprising a VH having an amino acid sequence of SEQ ID NO:643, and a VL having an amino acid sequence of SEQ ID NO:644. In one aspect, provided herein is an antibody that binds TRGV9, comprising a heavy chain having an amino acid sequence of SEQ ID NO:645. In one aspect, provided herein is an antibody that binds TRGV9, comprising a light chain having an amino acid sequence of SEQ ID NO:646. In one aspect, provided herein is an antibody that binds TRGV9, comprising a heavy chain having an amino acid sequence of SEQ ID NO:645, and a light chain having an amino acid sequence of SEQ ID NO:646. In one aspect, provided herein is an antibody that binds TRGV9, comprising a VH having an amino acid sequence having at least 95% identity to an amino acid sequence of SEQ ID NO:643. In one aspect, provided herein is an antibody that binds TRGV9, comprising a VL having an amino acid sequence having at least 95% identity to an amino acid sequence of SEQ ID NO:644. In one aspect, provided herein is an antibody that binds TRGV9, comprising a VH having an amino acid sequence having at least 95% identity to an amino acid sequence of SEQ ID NO:643, and a VL having an amino acid sequence having at least 95% identity to an amino acid sequence of SEQ ID NO:644. In one aspect, provided herein is an antibody that binds TRGV9, comprising a heavy chain having an amino acid sequence having at least 95% identity to an amino acid sequence of SEQ ID NO:645. In one aspect, provided herein is an antibody that binds TRGV9, comprising a light chain having an amino acid sequence having at least 95% identity to an amino acid sequence of SEQ ID NO:646. In one aspect, provided herein is an antibody that binds TRGV9, comprising a heavy chain having an amino acid sequence having at least 95% identity to an amino acid sequence of SEQ ID NO:645, and a light chain having an amino acid sequence having at least 95% identity to an amino acid sequence of SEQ ID NO:646.

[0118] In one aspect, provided herein is an antibody that binds TRGV9, comprising: (i) a VH comprising a VH CDR1, a VH CDR2, and a VH CDR3 having an amino acid sequence of SEQ ID NOs:647, 648, and 649, respectively, and (ii) a VL comprising a VL CDR1, VL CDR2, and VL CDR3 having an amino acid sequence of SEQ ID NOs:650, 651, and 652, respectively. In one aspect, provided herein is an antibody that binds TRGV9, comprising: (i) a VH comprising a VH CDR1, a VH CDR2, and a VH CDR3 having an amino acid sequence of SEQ ID NOs:653, 654, and 655, respectively, and (ii) a VL comprising a VL CDR1, VL CDR2, and VL CDR3 having an amino acid sequence of SEQ ID NOs:656, 657, and 658, respectively. In one aspect, provided herein is an antibody that binds TRGV9, comprising: (i) a VH comprising a VH CDR1, a VH CDR2, and a VH CDR3 having an amino acid sequence of SEQ ID NOs:659, 660, and 661, respectively, and (ii) a VL comprising a VL CDR1, VL CDR2, and VL CDR3 having an amino acid sequence of SEQ ID NOs:662, 663, and 664, respectively. In one aspect, provided herein is an antibody that binds TRGV9, comprising: (i) a VH comprising a VH CDR1, a VH CDR2, and a VH CDR3 having an amino acid sequence of SEQ ID NOs:665, 666, and 667, respectively, and (ii) a VL comprising a VL CDR1, VL CDR2, and VL CDR3 having an amino acid sequence of SEQ ID NOs:668, 669, and 670, respectively. In one aspect, provided herein is an antibody that binds TRGV9, comprising: (i) a VH comprising a VH CDR1, a VH CDR2, and a VH CDR3 having an amino acid sequence of SEQ ID NOs:671, 672, and 673, respectively, and (ii) a VL comprising a VL CDR1, VL CDR2, and VL CDR3 having an amino acid sequence of SEQ ID NOs:674, 675, and 676, respectively. In one aspect, provided herein is an antibody that binds TRGV9, comprising: (i) a VH comprising a VH CDR1, a VH CDR2, and a VH CDR3 having an amino acid sequence of a VH CDR1, a VH CDR2, and a VH CDR3, respectively, of a VH having an amino acid sequence of SEQ ID NO:677; and (ii) a VL comprising a VL CDR1, a VL CDR2, and a VL CDR3 having an amino acid sequence of a VL CDR1, a VL CDR2, and a VL CDR3, respectively, of SEQ ID NO:678. In one aspect, provided herein is an antibody that binds TRGV9, comprising a VH having an amino acid sequence of SEQ ID NO:677. In one aspect, provided herein is an antibody that binds TRGV9, comprising a VL having an amino acid sequence of SEQ ID NO:678. In one aspect, provided herein is an antibody that binds TRGV9, comprising a VH having an amino acid sequence of SEQ ID NO:677, and a VL having an amino acid sequence of SEQ ID NO:678. In one aspect, provided herein is an antibody that binds TRGV9, comprising a heavy chain having an amino acid sequence of SEQ ID NO:679. In one aspect, provided herein is an antibody that binds TRGV9, comprising a light chain having an amino acid sequence of SEQ ID NO:680. In one aspect, provided herein is an antibody that binds TRGV9, comprising a heavy chain having an amino acid sequence of SEQ ID NO:679, and a light chain having an amino acid sequence of SEQ ID NO:680. In one aspect, provided herein is an antibody that binds TRGV9, comprising a VH having an amino acid sequence having at least 95% identity to an amino acid sequence of SEQ ID NO:677. In one aspect, provided herein is an antibody that binds TRGV9, comprising a VL having an amino acid sequence having at least 95% identity to an amino acid sequence of SEQ ID NO:678. In one aspect, provided herein is an antibody that binds TRGV9, comprising a VH having an amino acid sequence having at least 95% identity to an amino acid sequence of SEQ ID NO:677, and a VL having an amino acid sequence having at least 95% identity to an amino acid sequence of SEQ ID NO:678. In one aspect, provided herein is an antibody that binds TRGV9, comprising a heavy chain having an amino acid sequence having at least 95% identity to an amino acid sequence of SEQ ID NO:679. In one aspect, provided herein is an antibody that binds TRGV9, comprising a light chain having an amino acid sequence having at least 95% identity to an amino acid sequence of SEQ ID NO:680. In one aspect, provided herein is an antibody that binds TRGV9, comprising a heavy chain having an amino acid sequence having at least 95% identity to an amino acid sequence of SEQ ID NO:679, and a light chain having an amino acid sequence having at least 95% identity to an amino acid sequence of SEQ ID NO:680.

[0119] In one aspect, provided herein is an antibody that binds TRGV9, comprising: (i) a VH comprising a VH CDR1, a VH CDR2, and a VH CDR3 having an amino acid sequence of SEQ ID NOs:681, 682, and 683, respectively, and (ii) a VL comprising a VL CDR1, VL CDR2, and VL CDR3 having an amino acid sequence of SEQ ID NOs:684, 685, and 686, respectively. In one aspect, provided herein is an antibody that binds TRGV9, comprising: (i) a VH comprising a VH CDR1, a VH CDR2, and a VH CDR3 having an amino acid sequence of SEQ ID NOs:687, 688, and 689, respectively, and (ii) a VL comprising a VL CDR1, VL CDR2, and VL CDR3 having an amino acid sequence of SEQ ID NOs:690, 691, and 692, respectively. In one aspect, provided herein is an antibody that binds TRGV9, comprising: (i) a VH comprising a VH CDR1, a VH CDR2, and a VH CDR3 having an amino acid sequence of SEQ ID NOs:693, 694, and 695, respectively, and (ii) a VL comprising a VL CDR1, VL CDR2, and VL CDR3 having an amino acid sequence of SEQ ID NOs:696, 697, and 698, respectively. In one aspect, provided herein is an antibody that binds TRGV9, comprising: (i) a VH comprising a VH CDR1, a VH CDR2, and a VH CDR3 having an amino acid sequence of SEQ ID NOs:699, 700, and 701, respectively, and (ii) a VL comprising a VL CDR1, VL CDR2, and VL CDR3 having an amino acid sequence of SEQ ID NOs:702, 703, and 704, respectively. In one aspect, provided herein is an antibody that binds TRGV9, comprising: (i) a VH comprising a VH CDR1, a VH CDR2, and a VH CDR3 having an amino acid sequence of SEQ ID NOs:705, 706, and 707, respectively, and (ii) a VL comprising a VL CDR1, VL CDR2, and VL CDR3 having an amino acid sequence of SEQ ID NOs:708, 709, and 710, respectively. In one aspect, provided herein is an antibody that binds TRGV9, comprising: (i) a VH comprising a VH CDR1, a VH CDR2, and a VH CDR3 having an amino acid sequence of a VH CDR1, a VH CDR2, and a VH CDR3, respectively, of a VH having an amino acid sequence of SEQ ID NO:711; and (ii) a VL comprising a VL CDR1, a VL CDR2, and a VL CDR3 having an amino acid sequence of a VL CDR1, a VL CDR2, and a VL CDR3, respectively, of SEQ ID NO:712. In one aspect, provided herein is an antibody that binds TRGV9, comprising a VH having an amino acid sequence of SEQ ID NO:711. In one aspect, provided herein is an antibody that binds TRGV9, comprising a VL having an amino acid sequence of SEQ ID NO:712. In one aspect, provided herein is an antibody that binds TRGV9, comprising a VH having an amino acid sequence of SEQ ID NO:711, and a VL having an amino acid sequence of SEQ ID NO:712. In one aspect, provided herein is an antibody that binds TRGV9, comprising a heavy chain having an amino acid sequence of SEQ ID NO:713. In one aspect, provided herein is an antibody that binds TRGV9, comprising a light chain having an amino acid sequence of SEQ ID NO:714. In one aspect, provided herein is an antibody that binds TRGV9, comprising a heavy chain having an amino acid sequence of SEQ ID NO:713, and a light chain having an amino acid sequence of SEQ ID NO:714. In one aspect, provided herein is an antibody that binds TRGV9, comprising a VH having an amino acid sequence having at least 95% identity to an amino acid sequence of SEQ ID NO:711. In one aspect, provided herein is an antibody that binds TRGV9, comprising a VL having an amino acid sequence having at least 95% identity to an amino acid sequence of SEQ ID NO:712. In one aspect, provided herein is an antibody that binds TRGV9, comprising a VH having an amino acid sequence having at least 95% identity to an amino acid sequence of SEQ ID NO:711, and a VL having an amino acid sequence having at least 95% identity to an amino acid sequence of SEQ ID NO:712. In one aspect, provided herein is an antibody that binds TRGV9, comprising a heavy chain having an amino acid sequence having at least 95% identity to an amino acid sequence of SEQ ID NO:713. In one aspect, provided herein is an antibody that binds TRGV9, comprising a light chain having an amino acid sequence having at least 95% identity to an amino acid sequence of SEQ ID NO:714. In one aspect, provided herein is an antibody that binds TRGV9, comprising a heavy chain having an amino acid sequence having at least 95% identity to an amino acid sequence of SEQ ID NO:713, and a light chain having an amino acid sequence having at least 95% identity to an amino acid sequence of SEQ ID NO:714.

[0120] In one aspect, provided herein is an antibody that binds TRGV9, comprising: (i) a VH comprising a VH CDR1, a VH CDR2, and a VH CDR3 having an amino acid sequence of SEQ ID NOs:715, 716, and 717, respectively, and (ii) a VL comprising a VL CDR1, VL CDR2, and VL CDR3 having an amino acid sequence of SEQ ID NOs:718, 719, and 720, respectively. In one aspect, provided herein is an antibody that binds TRGV9, comprising: (i) a VH comprising a VH CDR1, a VH CDR2, and a VH CDR3 having an amino acid sequence of SEQ ID NOs:721, 722, and 723, respectively, and (ii) a VL comprising a VL CDR1, VL CDR2, and VL CDR3 having an amino acid sequence of SEQ ID NOs:724, 725, and 726, respectively. In one aspect, provided herein is an antibody that binds TRGV9, comprising: (i) a VH comprising a VH CDR1, a VH CDR2, and a VH CDR3 having an amino acid sequence of SEQ ID NOs:727, 728, and 729, respectively, and (ii) a VL comprising a VL CDR1, VL CDR2, and VL CDR3 having an amino acid sequence of SEQ ID NOs:730, 731, and 732, respectively. In one aspect, provided herein is an antibody that binds TRGV9, comprising: (i) a VH comprising a VH CDR1, a VH CDR2, and a VH CDR3 having an amino acid sequence of SEQ ID NOs:733, 734, and 735, respectively, and (ii) a VL comprising a VL CDR1, VL CDR2, and VL CDR3 having an amino acid sequence of SEQ ID NOs:736, 737, and 738, respectively. In one aspect, provided herein is an antibody that binds TRGV9, comprising: (i) a VH comprising a VH CDR1, a VH CDR2, and a VH CDR3 having an amino acid sequence of SEQ ID NOs:739, 740, and 741, respectively, and (ii) a VL comprising a VL CDR1, VL CDR2, and VL CDR3 having an amino acid sequence of SEQ ID NOs:742, 743, and 744, respectively. In one aspect, provided herein is an antibody that binds TRGV9, comprising: (i) a VH comprising a VH CDR1, a VH CDR2, and a VH CDR3 having an amino acid sequence of a VH CDR1, a VH CDR2, and a VH CDR3, respectively, of a VH having an amino acid sequence of SEQ ID NO:745; and (ii) a VL comprising a VL CDR1, a VL CDR2, and a VL CDR3 having an amino acid sequence of a VL CDR1, a VL CDR2, and a VL CDR3, respectively, of SEQ ID NO:746. In one aspect, provided herein is an antibody that binds TRGV9, comprising a VH having an amino acid sequence of SEQ ID NO:745. In one aspect, provided herein is an antibody that binds TRGV9, comprising a VL having an amino acid sequence of SEQ ID NO:746. In one aspect, provided herein is an antibody that binds TRGV9, comprising a VH having an amino acid sequence of SEQ ID NO:745, and a VL having an amino acid sequence of SEQ ID NO:746. In one aspect, provided herein is an antibody that binds TRGV9, comprising a heavy chain having an amino acid sequence of SEQ ID NO:747. In one aspect, provided herein is an antibody that binds TRGV9, comprising a light chain having an amino acid sequence of SEQ ID NO:748. In one aspect, provided herein is an antibody that binds TRGV9, comprising a heavy chain having an amino acid sequence of SEQ ID NO:747, and a light chain having an amino acid sequence of SEQ ID NO:748. In one aspect, provided herein is an antibody that binds TRGV9, comprising a VH having an amino acid sequence having at least 95% identity to an amino acid sequence of SEQ ID NO:745. In one aspect, provided herein is an antibody that binds TRGV9, comprising a VL having an amino acid sequence having at least 95% identity to an amino acid sequence of SEQ ID NO:746. In one aspect, provided herein is an antibody that binds TRGV9, comprising a VH having an amino acid sequence having at least 95% identity to an amino acid sequence of SEQ ID NO:745, and a VL having an amino acid sequence having at least 95% identity to an amino acid sequence of SEQ ID NO:746. In one aspect, provided herein is an antibody that binds TRGV9, comprising a heavy chain having an amino acid sequence having at least 95% identity to an amino acid sequence of SEQ ID NO:747. In one aspect, provided herein is an antibody that binds TRGV9, comprising a light chain having an amino acid sequence having at least 95% identity to an amino acid sequence of SEQ ID NO:748. In one aspect, provided herein is an antibody that binds TRGV9, comprising a heavy chain having an amino acid sequence having at least 95% identity to an amino acid sequence of SEQ ID NO:747, and a light chain having an amino acid sequence having at least 95% identity to an amino acid sequence of SEQ ID NO:748.

[0121] In one aspect, provided herein is an antibody that binds TRGV9, comprising: (i) a VH comprising a VH CDR1, a VH CDR2, and a VH CDR3 having an amino acid sequence of SEQ ID NOs:749, 750, and 751, respectively, and (ii) a VL comprising a VL CDR1, VL CDR2, and VL CDR3 having an amino acid sequence of SEQ ID NOs:752, 753, and 754, respectively. In one aspect, provided herein is an antibody that binds TRGV9, comprising: (i) a VH comprising a VH CDR1, a VH CDR2, and a VH CDR3 having an amino acid sequence of SEQ ID NOs:755, 756, and 757, respectively, and (ii) a VL comprising a VL CDR1, VL CDR2, and VL CDR3 having an amino acid sequence of SEQ ID NOs:758, 759, and 760, respectively. In one aspect, provided herein is an antibody that binds TRGV9, comprising: (i) a VH comprising a VH CDR1, a VH CDR2, and a VH CDR3 having an amino acid sequence of SEQ ID NOs:761, 762, and 763, respectively, and (ii) a VL comprising a VL CDR1, VL CDR2, and VL CDR3 having an amino acid sequence of SEQ ID NOs:764, 765, and 766, respectively. In one aspect, provided herein is an antibody that binds TRGV9, comprising: (i) a VH comprising a VH CDR1, a VH CDR2, and a VH CDR3 having an amino acid sequence of SEQ ID NOs:767, 768, and 769, respectively, and (ii) a VL comprising a VL CDR1, VL CDR2, and VL CDR3 having an amino acid sequence of SEQ ID NOs:770, 771, and 772, respectively. In one aspect, provided herein is an antibody that binds TRGV9, comprising: (i) a VH comprising a VH CDR1, a VH CDR2, and a VH CDR3 having an amino acid sequence of SEQ ID NOs:773, 774, and 775, respectively, and (ii) a VL comprising a VL CDR1, VL CDR2, and VL CDR3 having an amino acid sequence of SEQ ID NOs:776, 777, and 778, respectively. In one aspect, provided herein is an antibody that binds TRGV9, comprising: (i) a VH comprising a VH CDR1, a VH CDR2, and a VH CDR3 having an amino acid sequence of a VH CDR1, a VH CDR2, and a VH CDR3, respectively, of a VH having an amino acid sequence of SEQ ID NO:779; and (ii) a VL comprising a VL CDR1, a VL CDR2, and a VL CDR3 having an amino acid sequence of a VL CDR1, a VL CDR2, and a VL CDR3, respectively, of SEQ ID NO:780. In one aspect, provided herein is an antibody that binds TRGV9, comprising a VH having an amino acid sequence of SEQ ID NO:779. In one aspect, provided herein is an antibody that binds TRGV9, comprising a VL having an amino acid sequence of SEQ ID NO:780. In one aspect, provided herein is an antibody that binds TRGV9, comprising a VH having an amino acid sequence of SEQ ID NO:779, and a VL having an amino acid sequence of SEQ ID NO:780. In one aspect, provided herein is an antibody that binds TRGV9, comprising a heavy chain having an amino acid sequence of SEQ ID NO:781. In one aspect, provided herein is an antibody that binds TRGV9, comprising a light chain having an amino acid sequence of SEQ ID NO:782. In one aspect, provided herein is an antibody that binds TRGV9, comprising a heavy chain having an amino acid sequence of SEQ ID NO:781, and a light chain having an amino acid sequence of SEQ ID NO:782. In one aspect, provided herein is an antibody that binds TRGV9, comprising a VH having an amino acid sequence having at least 95% identity to an amino acid sequence of SEQ ID NO:779. In one aspect, provided herein is an antibody that binds TRGV9, comprising a VL having an amino acid sequence having at least 95% identity to an amino acid sequence of SEQ ID NO:780. In one aspect, provided herein is an antibody that binds TRGV9, comprising a VH having an amino acid sequence having at least 95% identity to an amino acid sequence of SEQ ID NO:779, and a VL having an amino acid sequence having at least 95% identity to an amino acid sequence of SEQ ID NO:780. In one aspect, provided herein is an antibody that binds TRGV9, comprising a heavy chain having an amino acid sequence having at least 95% identity to an amino acid sequence of SEQ ID NO:781. In one aspect, provided herein is an antibody that binds TRGV9, comprising a light chain having an amino acid sequence having at least 95% identity to an amino acid sequence of SEQ ID NO:782. In one aspect, provided herein is an antibody that binds TRGV9, comprising a heavy chain having an amino acid sequence having at least 95% identity to an amino acid sequence of SEQ ID NO:781, and a light chain having an amino acid sequence having at least 95% identity to an amino acid sequence of SEQ ID NO:782.

[0122] In one aspect, provided herein is an antibody that binds TRGV9, comprising: (i) a VH comprising a VH CDR1, a VH CDR2, and a VH CDR3 having an amino acid sequence of SEQ ID NOs:783, 784, and 785, respectively, and (ii) a VL comprising a VL CDR1, VL CDR2, and VL CDR3 having an amino acid sequence of SEQ ID NOs:786, 787, and 788, respectively. In one aspect, provided herein is an antibody that binds TRGV9, comprising: (i) a VH comprising a VH CDR1, a VH CDR2, and a VH CDR3 having an amino acid sequence of SEQ ID NOs:789, 790, and 791, respectively, and (ii) a VL comprising a VL CDR1, VL CDR2, and VL CDR3 having an amino acid sequence of SEQ ID NOs:792, 793, and 794, respectively. In one aspect, provided herein is an antibody that binds TRGV9, comprising: (i) a VH comprising a VH CDR1, a VH CDR2, and a VH CDR3 having an amino acid sequence of SEQ ID NOs:795, 796, and 797, respectively, and (ii) a VL comprising a VL CDR1, VL CDR2, and VL CDR3 having an amino acid sequence of SEQ ID NOs:798, 799, and 800, respectively. In one aspect, provided herein is an antibody that binds TRGV9, comprising: (i) a VH comprising a VH CDR1, a VH CDR2, and a VH CDR3 having an amino acid sequence of SEQ ID NOs:801, 802, and 803, respectively, and (ii) a VL comprising a VL CDR1, VL CDR2, and VL CDR3 having an amino acid sequence of SEQ ID NOs:804, 805, and 806, respectively. In one aspect, provided herein is an antibody that binds TRGV9, comprising: (i) a VH comprising a VH CDR1, a VH CDR2, and a VH CDR3 having an amino acid sequence of SEQ ID NOs:807, 808, and 809, respectively, and (ii) a VL comprising a VL CDR1, VL CDR2, and VL CDR3 having an amino acid sequence of SEQ ID NOs:810, 811, and 812, respectively. In one aspect, provided herein is an antibody that binds TRGV9, comprising: (i) a VH comprising a VH CDR1, a VH CDR2, and a VH CDR3 having an amino acid sequence of a VH CDR1, a VH CDR2, and a VH CDR3, respectively, of a VH having an amino acid sequence of SEQ ID NO:813; and (ii) a VL comprising a VL CDR1, a VL CDR2, and a VL CDR3 having an amino acid sequence of a VL CDR1, a VL CDR2, and a VL CDR3, respectively, of SEQ ID NO:814. In one aspect, provided herein is an antibody that binds TRGV9, comprising a VH having an amino acid sequence of SEQ ID NO:813. In one aspect, provided herein is an antibody that binds TRGV9, comprising a VL having an amino acid sequence of SEQ ID NO:814. In one aspect, provided herein is an antibody that binds TRGV9, comprising a VH having an amino acid sequence of SEQ ID NO:813, and a VL having an amino acid sequence of SEQ ID NO:814. In one aspect, provided herein is an antibody that binds TRGV9, comprising a heavy chain having an amino acid sequence of SEQ ID NO:815. In one aspect, provided herein is an antibody that binds TRGV9, comprising a light chain having an amino acid sequence of SEQ ID NO:816. In one aspect, provided herein is an antibody that binds TRGV9, comprising a heavy chain having an amino acid sequence of SEQ ID NO:815, and a light chain having an amino acid sequence of SEQ ID NO:816. In one aspect, provided herein is an antibody that binds TRGV9, comprising a VH having an amino acid sequence having at least 95% identity to an amino acid sequence of SEQ ID NO:813. In one aspect, provided herein is an antibody that binds TRGV9, comprising a VL having an amino acid sequence having at least 95% identity to an amino acid sequence of SEQ ID NO:814. In one aspect, provided herein is an antibody that binds TRGV9, comprising a VH having an amino acid sequence having at least 95% identity to an amino acid sequence of SEQ ID NO:813, and a VL having an amino acid sequence having at least 95% identity to an amino acid sequence of SEQ ID NO:814. In one aspect, provided herein is an antibody that binds TRGV9, comprising a heavy chain having an amino acid sequence having at least 95% identity to an amino acid sequence of SEQ ID NO:815. In one aspect, provided herein is an antibody that binds TRGV9, comprising a light chain having an amino acid sequence having at least 95% identity to an amino acid sequence of SEQ ID NO:816. In one aspect, provided herein is an antibody that binds TRGV9, comprising a heavy chain having an amino acid sequence having at least 95% identity to an amino acid sequence of SEQ ID NO:815, and a light chain having an amino acid sequence having at least 95% identity to an amino acid sequence of SEQ ID NO:816.

[0123] In one aspect, provided herein is an antibody that binds TRGV9, comprising: (i) a VH comprising a VH CDR1, a VH CDR2, and a VH CDR3 having an amino acid sequence of SEQ ID NOs:817, 818, and 819, respectively, and (ii) a VL comprising a VL CDR1, VL CDR2, and VL CDR3 having an amino acid sequence of SEQ ID NOs:820, 821, and 822, respectively. In one aspect, provided herein is an antibody that binds TRGV9, comprising: (i) a VH comprising a VH CDR1, a VH CDR2, and a VH CDR3 having an amino acid sequence of SEQ ID NOs:823, 824, and 825, respectively, and (ii) a VL comprising a VL CDR1, VL CDR2, and VL CDR3 having an amino acid sequence of SEQ ID NOs:826, 827, and 828, respectively. In one aspect, provided herein is an antibody that binds TRGV9, comprising: (i) a VH comprising a VH CDR1, a VH CDR2, and a VH CDR3 having an amino acid sequence of SEQ ID NOs:829, 830, and 831, respectively, and (ii) a VL comprising a VL CDR1, VL CDR2, and VL CDR3 having an amino acid sequence of SEQ ID NOs:832, 833, and 834, respectively. In one aspect, provided herein is an antibody that binds TRGV9, comprising: (i) a VH comprising a VH CDR1, a VH CDR2, and a VH CDR3 having an amino acid sequence of SEQ ID NOs:835, 836, and 837, respectively, and (ii) a VL comprising a VL CDR1, VL CDR2, and VL CDR3 having an amino acid sequence of SEQ ID NOs:838, 839, and 840, respectively. In one aspect, provided herein is an antibody that binds TRGV9, comprising: (i) a VH comprising a VH CDR1, a VH CDR2, and a VH CDR3 having an amino acid sequence of SEQ ID NOs:841, 842, and 843, respectively, and (ii) a VL comprising a VL CDR1, VL CDR2, and VL CDR3 having an amino acid sequence of SEQ ID NOs:844, 845, and 846, respectively. In one aspect, provided herein is an antibody that binds TRGV9, comprising: (i) a VH comprising a VH CDR1, a VH CDR2, and a VH CDR3 having an amino acid sequence of a VH CDR1, a VH CDR2, and a VH CDR3, respectively, of a VH having an amino acid sequence of SEQ ID NO:847; and (ii) a VL comprising a VL CDR1, a VL CDR2, and a VL CDR3 having an amino acid sequence of a VL CDR1, a VL CDR2, and a VL CDR3, respectively, of SEQ ID NO:848. In one aspect, provided herein is an antibody that binds TRGV9, comprising a VH having an amino acid sequence of SEQ ID NO:847. In one aspect, provided herein is an antibody that binds TRGV9, comprising a VL having an amino acid sequence of SEQ ID NO:848. In one aspect, provided herein is an antibody that binds TRGV9, comprising a VH having an amino acid sequence of SEQ ID NO:847, and a VL having an amino acid sequence of SEQ ID NO:848. In one aspect, provided herein is an antibody that binds TRGV9, comprising a heavy chain having an amino acid sequence of SEQ ID NO:849. In one aspect, provided herein is an antibody that binds TRGV9, comprising a light chain having an amino acid sequence of SEQ ID NO:850. In one aspect, provided herein is an antibody that binds TRGV9, comprising a heavy chain having an amino acid sequence of SEQ ID NO:849, and a light chain having an amino acid sequence of SEQ ID NO:850. In one aspect, provided herein is an antibody that binds TRGV9, comprising a VH having an amino acid sequence having at least 95% identity to an amino acid sequence of SEQ ID NO:847. In one aspect, provided herein is an antibody that binds TRGV9, comprising a VL having an amino acid sequence having at least 95% identity to an amino acid sequence of SEQ ID NO:848. In one aspect, provided herein is an antibody that binds TRGV9, comprising a VH having an amino acid sequence having at least 95% identity to an amino acid sequence of SEQ ID NO:847, and a VL having an amino acid sequence having at least 95% identity to an amino acid sequence of SEQ ID NO:848. In one aspect, provided herein is an antibody that binds TRGV9, comprising a heavy chain having an amino acid sequence having at least 95% identity to an amino acid sequence of SEQ ID NO:849. In one aspect, provided herein is an antibody that binds TRGV9, comprising a light chain having an amino acid sequence having at least 95% identity to an amino acid sequence of SEQ ID NO:850. In one aspect, provided herein is an antibody that binds TRGV9, comprising a heavy chain having an amino acid sequence having at least 95% identity to an amino acid sequence of SEQ ID NO:849, and a light chain having an amino acid sequence having at least 95% identity to an amino acid sequence of SEQ ID NO:850.

[0124] In one aspect, provided herein is an antibody that binds TRGV9, comprising: (i) a VH comprising a VH CDR1, a VH CDR2, and a VH CDR3 having an amino acid sequence of SEQ ID NOs:851, 852, and 853, respectively, and (ii) a VL comprising a VL CDR1, VL CDR2, and VL CDR3 having an amino acid sequence of SEQ ID NOs:854, 855, and 856, respectively. In one aspect, provided herein is an antibody that binds TRGV9, comprising: (i) a VH comprising a VH CDR1, a VH CDR2, and a VH CDR3 having an amino acid sequence of SEQ ID NOs:857, 858, and 859, respectively, and (ii) a VL comprising a VL CDR1, VL CDR2, and VL CDR3 having an amino acid sequence of SEQ ID NOs:860, 861, and 862, respectively. In one aspect, provided herein is an antibody that binds TRGV9, comprising: (i) a VH comprising a VH CDR1, a VH CDR2, and a VH CDR3 having an amino acid sequence of SEQ ID NOs:863, 864, and 865, respectively, and (ii) a VL comprising a VL CDR1, VL CDR2, and VL CDR3 having an amino acid sequence of SEQ ID NOs:866, 867, and 868, respectively. In one aspect, provided herein is an antibody that binds TRGV9, comprising: (i) a VH comprising a VH CDR1, a VH CDR2, and a VH CDR3 having an amino acid sequence of SEQ ID NOs:869, 870, and 871, respectively, and (ii) a VL comprising a VL CDR1, VL CDR2, and VL CDR3 having an amino acid sequence of SEQ ID NOs:872, 873, and 874, respectively. In one aspect, provided herein is an antibody that binds TRGV9, comprising: (i) a VH comprising a VH CDR1, a VH CDR2, and a VH CDR3 having an amino acid sequence of SEQ ID NOs:875, 876, and 877, respectively, and (ii) a VL comprising a VL CDR1, VL CDR2, and VL CDR3 having an amino acid sequence of SEQ ID NOs:878, 879, and 880, respectively. In one aspect, provided herein is an antibody that binds TRGV9, comprising: (i) a VH comprising a VH CDR1, a VH CDR2, and a VH CDR3 having an amino acid sequence of a VH CDR1, a VH CDR2, and a VH CDR3, respectively, of a VH having an amino acid sequence of SEQ ID NO:881; and (ii) a VL comprising a VL CDR1, a VL CDR2, and a VL CDR3 having an amino acid sequence of a VL CDR1, a VL CDR2, and a VL CDR3, respectively, of SEQ ID NO:882. In one aspect, provided herein is an antibody that binds TRGV9, comprising a VH having an amino acid sequence of SEQ ID NO:881. In one aspect, provided herein is an antibody that binds TRGV9, comprising a VL having an amino acid sequence of SEQ ID NO:882. In one aspect, provided herein is an antibody that binds TRGV9, comprising a VH having an amino acid sequence of SEQ ID NO:881, and a VL having an amino acid sequence of SEQ ID NO:882. In one aspect, provided herein is an antibody that binds TRGV9, comprising a heavy chain having an amino acid sequence of SEQ ID NO:883. In one aspect, provided herein is an antibody that binds TRGV9, comprising a light chain having an amino acid sequence of SEQ ID NO:884. In one aspect, provided herein is an antibody that binds TRGV9, comprising a heavy chain having an amino acid sequence of SEQ ID NO:883, and a light chain having an amino acid sequence of SEQ ID NO:884. In one aspect, provided herein is an antibody that binds TRGV9, comprising a VH having an amino acid sequence having at least 95% identity to an amino acid sequence of SEQ ID NO:881. In one aspect, provided herein is an antibody that binds TRGV9, comprising a VL having an amino acid sequence having at least 95% identity to an amino acid sequence of SEQ ID NO:882. In one aspect, provided herein is an antibody that binds TRGV9, comprising a VH having an amino acid sequence having at least 95% identity to an amino acid sequence of SEQ ID NO:881, and a VL having an amino acid sequence having at least 95% identity to an amino acid sequence of SEQ ID NO:882. In one aspect, provided herein is an antibody that binds TRGV9, comprising a heavy chain having an amino acid sequence having at least 95% identity to an amino acid sequence of SEQ ID NO:883. In one aspect, provided herein is an antibody that binds TRGV9, comprising a light chain having an amino acid sequence having at least 95% identity to an amino acid sequence of SEQ ID NO:884. In one aspect, provided herein is an antibody that binds TRGV9, comprising a heavy chain having an amino acid sequence having at least 95% identity to an amino acid sequence of SEQ ID NO:883, and a light chain having an amino acid sequence having at least 95% identity to an amino acid sequence of SEQ ID NO:884.

[0125] In one aspect, provided herein is an antibody that binds TRGV9, comprising: (i) a VH comprising a VH CDR1, a VH CDR2, and a VH CDR3 having an amino acid sequence of SEQ ID NOs:885, 886, and 887, respectively, and (ii) a VL comprising a VL CDR1, VL CDR2, and VL CDR3 having an amino acid sequence of SEQ ID NOs:888, 889, and 890, respectively. In one aspect, provided herein is an antibody that binds TRGV9, comprising: (i) a VH comprising a VH CDR1, a VH CDR2, and a VH CDR3 having an amino acid sequence of SEQ ID NOs:891, 892, and 893, respectively, and (ii) a VL comprising a VL CDR1, VL CDR2, and VL CDR3 having an amino acid sequence of SEQ ID NOs:894, 895, and 896, respectively. In one aspect, provided herein is an antibody that binds TRGV9, comprising: (i) a VH comprising a VH CDR1, a VH CDR2, and a VH CDR3 having an amino acid sequence of SEQ ID NOs:897, 898, and 899, respectively, and (ii) a VL comprising a VL CDR1, VL CDR2, and VL CDR3 having an amino acid sequence of SEQ ID NOs:900, 901, and 902, respectively. In one aspect, provided herein is an antibody that binds TRGV9, comprising: (i) a VH comprising a VH CDR1, a VH CDR2, and a VH CDR3 having an amino acid sequence of SEQ ID NOs:903, 904, and 905, respectively, and (ii) a VL comprising a VL CDR1, VL CDR2, and VL CDR3 having an amino acid sequence of SEQ ID NOs:906, 907, and 908, respectively. In one aspect, provided herein is an antibody that binds TRGV9, comprising: (i) a VH comprising a VH CDR1, a VH CDR2, and a VH CDR3 having an amino acid sequence of SEQ ID NOs:909, 910, and 911, respectively, and (ii) a VL comprising a VL CDR1, VL CDR2, and VL CDR3 having an amino acid sequence of SEQ ID NOs:912, 913, and 914, respectively. In one aspect, provided herein is an antibody that binds TRGV9, comprising: (i) a VH comprising a VH CDR1, a VH CDR2, and a VH CDR3 having an amino acid sequence of a VH CDR1, a VH CDR2, and a VH CDR3, respectively, of a VH having an amino acid sequence of SEQ ID NO:915; and (ii) a VL comprising a VL CDR1, a VL CDR2, and a VL CDR3 having an amino acid sequence of a VL CDR1, a VL CDR2, and a VL CDR3, respectively, of SEQ ID NO:916. In one aspect, provided herein is an antibody that binds TRGV9, comprising a VH having an amino acid sequence of SEQ ID NO:915. In one aspect, provided herein is an antibody that binds TRGV9, comprising a VL having an amino acid sequence of SEQ ID NO:916. In one aspect, provided herein is an antibody that binds TRGV9, comprising a VH having an amino acid sequence of SEQ ID NO:915, and a VL having an amino acid sequence of SEQ ID NO:916. In one aspect, provided herein is an antibody that binds TRGV9, comprising a heavy chain having an amino acid sequence of SEQ ID NO:917. In one aspect, provided herein is an antibody that binds TRGV9, comprising a light chain having an amino acid sequence of SEQ ID NO:918. In one aspect, provided herein is an antibody that binds TRGV9, comprising a heavy chain having an amino acid sequence of SEQ ID NO:917, and a light chain having an amino acid sequence of SEQ ID NO:918. In one aspect, provided herein is an antibody that binds TRGV9, comprising a VH having an amino acid sequence having at least 95% identity to an amino acid sequence of SEQ ID NO:915. In one aspect, provided herein is an antibody that binds TRGV9, comprising a VL having an amino acid sequence having at least 95% identity to an amino acid sequence of SEQ ID NO:916. In one aspect, provided herein is an antibody that binds TRGV9, comprising a VH having an amino acid sequence having at least 95% identity to an amino acid sequence of SEQ ID NO:915, and a VL having an amino acid sequence having at least 95% identity to an amino acid sequence of SEQ ID NO:916. In one aspect, provided herein is an antibody that binds TRGV9, comprising a heavy chain having an amino acid sequence having at least 95% identity to an amino acid sequence of SEQ ID NO:917. In one aspect, provided herein is an antibody that binds TRGV9, comprising a light chain having an amino acid sequence having at least 95% identity to an amino acid sequence of SEQ ID NO:918. In one aspect, provided herein is an antibody that binds TRGV9, comprising a heavy chain having an amino acid sequence having at least 95% identity to an amino acid sequence of SEQ ID NO:917, and a light chain having an amino acid sequence having at least 95% identity to an amino acid sequence of SEQ ID NO:918.

[0126] In one aspect, provided herein is an antibody that binds TRGV9, comprising: (i) a VH comprising a VH CDR1, a VH CDR2, and a VH CDR3 having an amino acid sequence of SEQ ID NOs:919, 920, and 921, respectively, and (ii) a VL comprising a VL CDR1, VL CDR2, and VL CDR3 having an amino acid sequence of SEQ ID NOs:922, 923, and 924, respectively. In one aspect, provided herein is an antibody that binds TRGV9, comprising: (i) a VH comprising a VH CDR1, a VH CDR2, and a VH CDR3 having an amino acid sequence of SEQ ID NOs:925, 926, and 927, respectively, and (ii) a VL comprising a VL CDR1, VL CDR2, and VL CDR3 having an amino acid sequence of SEQ ID NOs:928, 929, and 930, respectively. In one aspect, provided herein is an antibody that binds TRGV9, comprising: (i) a VH comprising a VH CDR1, a VH CDR2, and a VH CDR3 having an amino acid sequence of SEQ ID NOs:931, 932, and 933, respectively, and (ii) a VL comprising a VL CDR1, VL CDR2, and VL CDR3 having an amino acid sequence of SEQ ID NOs:934, 935, and 936, respectively. In one aspect, provided herein is an antibody that binds TRGV9, comprising: (i) a VH comprising a VH CDR1, a VH CDR2, and a VH CDR3 having an amino acid sequence of SEQ ID NOs:937, 938, and 939, respectively, and (ii) a VL comprising a VL CDR1, VL CDR2, and VL CDR3 having an amino acid sequence of SEQ ID NOs:940, 941, and 942, respectively. In one aspect, provided herein is an antibody that binds TRGV9, comprising: (i) a VH comprising a VH CDR1, a VH CDR2, and a VH CDR3 having an amino acid sequence of SEQ ID NOs:943, 944, and 945, respectively, and (ii) a VL comprising a VL CDR1, VL CDR2, and VL CDR3 having an amino acid sequence of SEQ ID NOs:946, 947, and 948, respectively. In one aspect, provided herein is an antibody that binds TRGV9, comprising: (i) a VH comprising a VH CDR1, a VH CDR2, and a VH CDR3 having an amino acid sequence of a VH CDR1, a VH CDR2, and a VH CDR3, respectively, of a VH having an amino acid sequence of SEQ ID NO:949; and (ii) a VL comprising a VL CDR1, a VL CDR2, and a VL CDR3 having an amino acid sequence of a VL CDR1, a VL CDR2, and a VL CDR3, respectively, of SEQ ID NO:950. In one aspect, provided herein is an antibody that binds TRGV9, comprising a VH having an amino acid sequence of SEQ ID NO:949. In one aspect, provided herein is an antibody that binds TRGV9, comprising a VL having an amino acid sequence of SEQ ID NO:950. In one aspect, provided herein is an antibody that binds TRGV9, comprising a VH having an amino acid sequence of SEQ ID NO:949, and a VL having an amino acid sequence of SEQ ID NO:950. In one aspect, provided herein is an antibody that binds TRGV9, comprising a heavy chain having an amino acid sequence of SEQ ID NO:951. In one aspect, provided herein is an antibody that binds TRGV9, comprising a light chain having an amino acid sequence of SEQ ID NO:952. In one aspect, provided herein is an antibody that binds TRGV9, comprising a heavy chain having an amino acid sequence of SEQ ID NO:951, and a light chain having an amino acid sequence of SEQ ID NO:952. In one aspect, provided herein is an antibody that binds TRGV9, comprising a VH having an amino acid sequence having at least 95% identity to an amino acid sequence of SEQ ID NO:949. In one aspect, provided herein is an antibody that binds TRGV9, comprising a VL having an amino acid sequence having at least 95% identity to an amino acid sequence of SEQ ID NO:950. In one aspect, provided herein is an antibody that binds TRGV9, comprising a VH having an amino acid sequence having at least 95% identity to an amino acid sequence of SEQ ID NO:949, and a VL having an amino acid sequence having at least 95% identity to an amino acid sequence of SEQ ID NO:950. In one aspect, provided herein is an antibody that binds TRGV9, comprising a heavy chain having an amino acid sequence having at least 95% identity to an amino acid sequence of SEQ ID NO:951. In one aspect, provided herein is an antibody that binds TRGV9, comprising a light chain having an amino acid sequence having at least 95% identity to an amino acid sequence of SEQ ID NO:952. In one aspect, provided herein is an antibody that binds TRGV9, comprising a heavy chain having an amino acid sequence having at least 95% identity to an amino acid sequence of SEQ ID NO:951, and a light chain having an amino acid sequence having at least 95% identity to an amino acid sequence of SEQ ID NO:952.

[0127] In one aspect, provided herein is an antibody that binds TRGV9, comprising: (i) a VH comprising a VH CDR1, a VH CDR2, and a VH CDR3 having an amino acid sequence of SEQ ID NOs:953, 954, and 955, respectively, and (ii) a VL comprising a VL CDR1, VL CDR2, and VL CDR3 having an amino acid sequence of SEQ ID NOs:956, 957, and 958, respectively. In one aspect, provided herein is an antibody that binds TRGV9, comprising: (i) a VH comprising a VH CDR1, a VH CDR2, and a VH CDR3 having an amino acid sequence of SEQ ID NOs:959, 960, and 961, respectively, and (ii) a VL comprising a VL CDR1, VL CDR2, and VL CDR3 having an amino acid sequence of SEQ ID NOs:962, 963, and 964, respectively. In one aspect, provided herein is an antibody that binds TRGV9, comprising: (i) a VH comprising a VH CDR1, a VH CDR2, and a VH CDR3 having an amino acid sequence of SEQ ID NOs:965, 966, and 967, respectively, and (ii) a VL comprising a VL CDR1, VL CDR2, and VL CDR3 having an amino acid sequence of SEQ ID NOs:968, 969, and 970, respectively. In one aspect, provided herein is an antibody that binds TRGV9, comprising: (i) a VH comprising a VH CDR1, a VH CDR2, and a VH CDR3 having an amino acid sequence of SEQ ID NOs:971, 972, and 973, respectively, and (ii) a VL comprising a VL CDR1, VL CDR2, and VL CDR3 having an amino acid sequence of SEQ ID NOs:974, 975, and 976, respectively. In one aspect, provided herein is an antibody that binds TRGV9, comprising: (i) a VH comprising a VH CDR1, a VH CDR2, and a VH CDR3 having an amino acid sequence of SEQ ID NOs:977, 978, and 979, respectively, and (ii) a VL comprising a VL CDR1, VL CDR2, and VL CDR3 having an amino acid sequence of SEQ ID NOs:980, 981, and 982, respectively. In one aspect, provided herein is an antibody that binds TRGV9, comprising: (i) a VH comprising a VH CDR1, a VH CDR2, and a VH CDR3 having an amino acid sequence of a VH CDR1, a VH CDR2, and a VH CDR3, respectively, of a VH having an amino acid sequence of SEQ ID NO:983; and (ii) a VL comprising a VL CDR1, a VL CDR2, and a VL CDR3 having an amino acid sequence of a VL CDR1, a VL CDR2, and a VL CDR3, respectively, of SEQ ID NO:984. In one aspect, provided herein is an antibody that binds TRGV9, comprising a VH having an amino acid sequence of SEQ ID NO:983. In one aspect, provided herein is an antibody that binds TRGV9, comprising a VL having an amino acid sequence of SEQ ID NO:984. In one aspect, provided herein is an antibody that binds TRGV9, comprising a VH having an amino acid sequence of SEQ ID NO:983, and a VL having an amino acid sequence of SEQ ID NO:984. In one aspect, provided herein is an antibody that binds TRGV9, comprising a heavy chain having an amino acid sequence of SEQ ID NO:985. In one aspect, provided herein is an antibody that binds TRGV9, comprising a light chain having an amino acid sequence of SEQ ID NO:986. In one aspect, provided herein is an antibody that binds TRGV9, comprising a heavy chain having an amino acid sequence of SEQ ID NO:985, and a light chain having an amino acid sequence of SEQ ID NO:986. In one aspect, provided herein is an antibody that binds TRGV9, comprising a VH having an amino acid sequence having at least 95% identity to an amino acid sequence of SEQ ID NO:983. In one aspect, provided herein is an antibody that binds TRGV9, comprising a VL having an amino acid sequence having at least 95% identity to an amino acid sequence of SEQ ID NO:984. In one aspect, provided herein is an antibody that binds TRGV9, comprising a VH having an amino acid sequence having at least 95% identity to an amino acid sequence of SEQ ID NO:983, and a VL having an amino acid sequence having at least 95% identity to an amino acid sequence of SEQ ID NO:984. In one aspect, provided herein is an antibody that binds TRGV9, comprising a heavy chain having an amino acid sequence having at least 95% identity to an amino acid sequence of SEQ ID NO:985. In one aspect, provided herein is an antibody that binds TRGV9, comprising a light chain having an amino acid sequence having at least 95% identity to an amino acid sequence of SEQ ID NO:986. In one aspect, provided herein is an antibody that binds TRGV9, comprising a heavy chain having an amino acid sequence having at least 95% identity to an amino acid sequence of SEQ ID NO:985, and a light chain having an amino acid sequence having at least 95% identity to an amino acid sequence of SEQ ID NO:986.

[0128] In one aspect, provided herein is an antibody that binds TRGV9, comprising: (i) a VH comprising a VH CDR1, a VH CDR2, and a VH CDR3 having an amino acid sequence of SEQ ID NOs:987, 988, and 989, respectively, and (ii) a VL comprising a VL CDR1, VL CDR2, and VL CDR3 having an amino acid sequence of SEQ ID NOs:990, 991, and 992, respectively. In one aspect, provided herein is an antibody that binds TRGV9, comprising: (i) a VH comprising a VH CDR1, a VH CDR2, and a VH CDR3 having an amino acid sequence of SEQ ID NOs:993, 994, and 995, respectively, and (ii) a VL comprising a VL CDR1, VL CDR2, and VL CDR3 having an amino acid sequence of SEQ ID NOs:996, 997, and 998, respectively. In one aspect, provided herein is an antibody that binds TRGV9, comprising: (i) a VH comprising a VH CDR1, a VH CDR2, and a VH CDR3 having an amino acid sequence of SEQ ID NOs:999, 1000, and 1001, respectively, and (ii) a VL comprising a VL CDR1, VL CDR2, and VL CDR3 having an amino acid sequence of SEQ ID NOs:1002, 1003, and 1004, respectively. In one aspect, provided herein is an antibody that binds TRGV9, comprising: (i) a VH comprising a VH CDR1, a VH CDR2, and a VH CDR3 having an amino acid sequence of SEQ ID NOs:1005, 1006, and 1007, respectively, and (ii) a VL comprising a VL CDR1, VL CDR2, and VL CDR3 having an amino acid sequence of SEQ ID NOs:1008, 1009, and 1010, respectively. In one aspect, provided herein is an antibody that binds TRGV9, comprising: (i) a VH comprising a VH CDR1, a VH CDR2, and a VH CDR3 having an amino acid sequence of SEQ ID NOs:1011, 1012, and 1013, respectively, and (ii) a VL comprising a VL CDR1, VL CDR2, and VL CDR3 having an amino acid sequence of SEQ ID NOs:1014, 1015, and 1016, respectively. In one aspect, provided herein is an antibody that binds TRGV9, comprising: (i) a VH comprising a VH CDR1, a VH CDR2, and a VH CDR3 having an amino acid sequence of a VH CDR1, a VH CDR2, and a VH CDR3, respectively, of a VH having an amino acid sequence of SEQ ID NO:1017; and (ii) a VL comprising a VL CDR1, a VL CDR2, and a VL CDR3 having an amino acid sequence of a VL CDR1, a VL CDR2, and a VL CDR3, respectively, of SEQ ID NO:1018. In one aspect, provided herein is an antibody that binds TRGV9, comprising a VH having an amino acid sequence of SEQ ID NO:1017. In one aspect, provided herein is an antibody that binds TRGV9, comprising a VL having an amino acid sequence of SEQ ID NO:1018. In one aspect, provided herein is an antibody that binds TRGV9, comprising a VH having an amino acid sequence of SEQ ID NO:1017, and a VL having an amino acid sequence of SEQ ID NO:1018. In one aspect, provided herein is an antibody that binds TRGV9, comprising a heavy chain having an amino acid sequence of SEQ ID NO:1019. In one aspect, provided herein is an antibody that binds TRGV9, comprising a light chain having an amino acid sequence of SEQ ID NO:1020. In one aspect, provided herein is an antibody that binds TRGV9, comprising a heavy chain having an amino acid sequence of SEQ ID NO:1019, and a light chain having an amino acid sequence of SEQ ID NO:1020. In one aspect, provided herein is an antibody that binds TRGV9, comprising a VH having an amino acid sequence having at least 95% identity to an amino acid sequence of SEQ ID NO:1017. In one aspect, provided herein is an antibody that binds TRGV9, comprising a VL having an amino acid sequence having at least 95% identity to an amino acid sequence of SEQ ID NO:1018. In one aspect, provided herein is an antibody that binds TRGV9, comprising a VH having an amino acid sequence having at least 95% identity to an amino acid sequence of SEQ ID NO:1017, and a VL having an amino acid sequence having at least 95% identity to an amino acid sequence of SEQ ID NO:1018. In one aspect, provided herein is an antibody that binds TRGV9, comprising a heavy chain having an amino acid sequence having at least 95% identity to an amino acid sequence of SEQ ID NO:1019. In one aspect, provided herein is an antibody that binds TRGV9, comprising a light chain having an amino acid sequence having at least 95% identity to an amino acid sequence of SEQ ID NO:1020. In one aspect, provided herein is an antibody that binds TRGV9, comprising a heavy chain having an amino acid sequence having at least 95% identity to an amino acid sequence of SEQ ID NO:1019, and a light chain having an amino acid sequence having at least 95% identity to an amino acid sequence of SEQ ID NO:1020.

[0129] In one aspect, provided herein is an antibody that binds TRGV9, comprising: (i) a VH comprising a VH CDR1, a VH CDR2, and a VH CDR3 having an amino acid sequence of SEQ ID NOs:1021, 1022, and 1023, respectively, and (ii) a VL comprising a VL CDR1, VL CDR2, and VL CDR3 having an amino acid sequence of SEQ ID NOs:1024, 1025, and 1026, respectively. In one aspect, provided herein is an antibody that binds TRGV9, comprising: (i) a VH comprising a VH CDR1, a VH CDR2, and a VH CDR3 having an amino acid sequence of SEQ ID NOs:1027, 1028, and 1029, respectively, and (ii) a VL comprising a VL CDR1, VL CDR2, and VL CDR3 having an amino acid sequence of SEQ ID NOs:1030, 1031, and 1032, respectively. In one aspect, provided herein is an antibody that binds TRGV9, comprising: (i) a VH comprising a VH CDR1, a VH CDR2, and a VH CDR3 having an amino acid sequence of SEQ ID NOs:1033, 1034, and 1035, respectively, and (ii) a VL comprising a VL CDR1, VL CDR2, and VL CDR3 having an amino acid sequence of SEQ ID NOs:1036, 1037, and 1038, respectively. In one aspect, provided herein is an antibody that binds TRGV9, comprising: (i) a VH comprising a VH CDR1, a VH CDR2, and a VH CDR3 having an amino acid sequence of SEQ ID NOs:1039, 1040, and 1041, respectively, and (ii) a VL comprising a VL CDR1, VL CDR2, and VL CDR3 having an amino acid sequence of SEQ ID NOs:1042, 1043, and 1044, respectively. In one aspect, provided herein is an antibody that binds TRGV9, comprising: (i) a VH comprising a VH CDR1, a VH CDR2, and a VH CDR3 having an amino acid sequence of SEQ ID NOs:1045, 1046, and 1047, respectively, and (ii) a VL comprising a VL CDR1, VL CDR2, and VL CDR3 having an amino acid sequence of SEQ ID NOs:1048, 1049, and 1050, respectively. In one aspect, provided herein is an antibody that binds TRGV9, comprising: (i) a VH comprising a VH CDR1, a VH CDR2, and a VH CDR3 having an amino acid sequence of a VH CDR1, a VH CDR2, and a VH CDR3, respectively, of a VH having an amino acid sequence of SEQ ID NO:1051; and (ii) a VL comprising a VL CDR1, a VL CDR2, and a VL CDR3 having an amino acid sequence of a VL CDR1, a VL CDR2, and a VL CDR3, respectively, of SEQ ID NO:1052. In one aspect, provided herein is an antibody that binds TRGV9, comprising a VH having an amino acid sequence of SEQ ID NO:1051. In one aspect, provided herein is an antibody that binds TRGV9, comprising a VL having an amino acid sequence of SEQ ID NO:1052. In one aspect, provided herein is an antibody that binds TRGV9, comprising a VH having an amino acid sequence of SEQ ID NO:1051, and a VL having an amino acid sequence of SEQ ID NO:1052. In one aspect, provided herein is an antibody that binds TRGV9, comprising a heavy chain having an amino acid sequence of SEQ ID NO:1053. In one aspect, provided herein is an antibody that binds TRGV9, comprising a light chain having an amino acid sequence of SEQ ID NO:1054. In one aspect, provided herein is an antibody that binds TRGV9, comprising a heavy chain having an amino acid sequence of SEQ ID NO:1053, and a light chain having an amino acid sequence of SEQ ID NO:1054. In one aspect, provided herein is an antibody that binds TRGV9, comprising a VH having an amino acid sequence having at least 95% identity to an amino acid sequence of SEQ ID NO:1051. In one aspect, provided herein is an antibody that binds TRGV9, comprising a VL having an amino acid sequence having at least 95% identity to an amino acid sequence of SEQ ID NO:1052. In one aspect, provided herein is an antibody that binds TRGV9, comprising a VH having an amino acid sequence having at least 95% identity to an amino acid sequence of SEQ ID NO:1051, and a VL having an amino acid sequence having at least 95% identity to an amino acid sequence of SEQ ID NO:1052. In one aspect, provided herein is an antibody that binds TRGV9, comprising a heavy chain having an amino acid sequence having at least 95% identity to an amino acid sequence of SEQ ID NO:1053. In one aspect, provided herein is an antibody that binds TRGV9, comprising a light chain having an amino acid sequence having at least 95% identity to an amino acid sequence of SEQ ID NO:1054. In one aspect, provided herein is an antibody that binds TRGV9, comprising a heavy chain having an amino acid sequence having at least 95% identity to an amino acid sequence of SEQ ID NO:1053, and a light chain having an amino acid sequence having at least 95% identity to an amino acid sequence of SEQ ID NO:1054.

[0130] In one aspect, provided herein is an antibody that binds TRGV9, comprising: (i) a VH comprising a VH CDR1, a VH CDR2, and a VH CDR3 having an amino acid sequence of SEQ ID NOs:1055, 1056, and 1057, respectively, and (ii) a VL comprising a VL CDR1, VL CDR2, and VL CDR3 having an amino acid sequence of SEQ ID NOs:1058, 1059, and 1060, respectively. In one aspect, provided herein is an antibody that binds TRGV9, comprising: (i) a VH comprising a VH CDR1, a VH CDR2, and a VH CDR3 having an amino acid sequence of SEQ ID NOs:1061, 1062, and 1063, respectively, and (ii) a VL comprising a VL CDR1, VL CDR2, and VL CDR3 having an amino acid sequence of SEQ ID NOs:1064, 1065, and 1066, respectively. In one aspect, provided herein is an antibody that binds TRGV9, comprising: (i) a VH comprising a VH CDR1, a VH CDR2, and a VH CDR3 having an amino acid sequence of SEQ ID NOs:1067, 1068, and 1069, respectively, and (ii) a VL comprising a VL CDR1, VL CDR2, and VL CDR3 having an amino acid sequence of SEQ ID NOs:1070, 1071, and 1072, respectively. In one aspect, provided herein is an antibody that binds TRGV9, comprising: (i) a VH comprising a VH CDR1, a VH CDR2, and a VH CDR3 having an amino acid sequence of SEQ ID NOs:1073, 1074, and 1075, respectively, and (ii) a VL comprising a VL CDR1, VL CDR2, and VL CDR3 having an amino acid sequence of SEQ ID NOs:1076, 1077, and 1078, respectively. In one aspect, provided herein is an antibody that binds TRGV9, comprising: (i) a VH comprising a VH CDR1, a VH CDR2, and a VH CDR3 having an amino acid sequence of SEQ ID NOs:1079, 1080, and 1081, respectively, and (ii) a VL comprising a VL CDR1, VL CDR2, and VL CDR3 having an amino acid sequence of SEQ ID NOs:1082, 1083, and 1084, respectively. In one aspect, provided herein is an antibody that binds TRGV9, comprising: (i) a VH comprising a VH CDR1, a VH CDR2, and a VH CDR3 having an amino acid sequence of a VH CDR1, a VH CDR2, and a VH CDR3, respectively, of a VH having an amino acid sequence of SEQ ID NO:1085; and (ii) a VL comprising a VL CDR1, a VL CDR2, and a VL CDR3 having an amino acid sequence of a VL CDR1, a VL CDR2, and a VL CDR3, respectively, of SEQ ID NO:1086. In one aspect, provided herein is an antibody that binds TRGV9, comprising a VH having an amino acid sequence of SEQ ID NO:1085. In one aspect, provided herein is an antibody that binds TRGV9, comprising a VL having an amino acid sequence of SEQ ID NO:1086. In one aspect, provided herein is an antibody that binds TRGV9, comprising a VH having an amino acid sequence of SEQ ID NO:1085, and a VL having an amino acid sequence of SEQ ID NO:1086. In one aspect, provided herein is an antibody that binds TRGV9, comprising a heavy chain having an amino acid sequence of SEQ ID NO:1087. In one aspect, provided herein is an antibody that binds TRGV9, comprising a light chain having an amino acid sequence of SEQ ID NO:1088. In one aspect, provided herein is an antibody that binds TRGV9, comprising a heavy chain having an amino acid sequence of SEQ ID NO:1087, and a light chain having an amino acid sequence of SEQ ID NO:1088. In one aspect, provided herein is an antibody that binds TRGV9, comprising a VH having an amino acid sequence having at least 95% identity to an amino acid sequence of SEQ ID NO:1085. In one aspect, provided herein is an antibody that binds TRGV9, comprising a VL having an amino acid sequence having at least 95% identity to an amino acid sequence of SEQ ID NO:1086. In one aspect, provided herein is an antibody that binds TRGV9, comprising a VH having an amino acid sequence having at least 95% identity to an amino acid sequence of SEQ ID NO:1085, and a VL having an amino acid sequence having at least 95% identity to an amino acid sequence of SEQ ID NO:1086. In one aspect, provided herein is an antibody that binds TRGV9, comprising a heavy chain having an amino acid sequence having at least 95% identity to an amino acid sequence of SEQ ID NO:1087. In one aspect, provided herein is an antibody that binds TRGV9, comprising a light chain having an amino acid sequence having at least 95% identity to an amino acid sequence of SEQ ID NO:1088. In one aspect, provided herein is an antibody that binds TRGV9, comprising a heavy chain having an amino acid sequence having at least 95% identity to an amino acid sequence of SEQ ID NO:1087, and a light chain having an amino acid sequence having at least 95% identity to an amino acid sequence of SEQ ID NO:1088.

[0131] In one aspect, provided herein is an antibody that binds TRGV9, comprising: (i) a VH comprising a VH CDR1, a VH CDR2, and a VH CDR3 having an amino acid sequence of SEQ ID NOs:1089, 1090, and 1091, respectively, and (ii) a VL comprising a VL CDR1, VL CDR2, and VL CDR3 having an amino acid sequence of SEQ ID NOs:1092, 1093, and 1094, respectively. In one aspect, provided herein is an antibody that binds TRGV9, comprising: (i) a VH comprising a VH CDR1, a VH CDR2, and a VH CDR3 having an amino acid sequence of SEQ ID NOs:1095, 1096, and 1097, respectively, and (ii) a VL comprising a VL CDR1, VL CDR2, and VL CDR3 having an amino acid sequence of SEQ ID NOs:1098, 1099, and 1100, respectively. In one aspect, provided herein is an antibody that binds TRGV9, comprising: (i) a VH comprising a VH CDR1, a VH CDR2, and a VH CDR3 having an amino acid sequence of SEQ ID NOs:1101, 1102, and 1103, respectively, and (ii) a VL comprising a VL CDR1, VL CDR2, and VL CDR3 having an amino acid sequence of SEQ ID NOs:1104, 1105, and 1106, respectively. In one aspect, provided herein is an antibody that binds TRGV9, comprising: (i) a VH comprising a VH CDR1, a VH CDR2, and a VH CDR3 having an amino acid sequence of SEQ ID NOs:1107, 1108, and 1109, respectively, and (ii) a VL comprising a VL CDR1, VL CDR2, and VL CDR3 having an amino acid sequence of SEQ ID NOs:1110, 1111, and 1112, respectively. In one aspect, provided herein is an antibody that binds TRGV9, comprising: (i) a VH comprising a VH CDR1, a VH CDR2, and a VH CDR3 having an amino acid sequence of SEQ ID NOs:1113, 1114, and 1115, respectively, and (ii) a VL comprising a VL CDR1, VL CDR2, and VL CDR3 having an amino acid sequence of SEQ ID NOs:1116, 1117, and 1118, respectively. In one aspect, provided herein is an antibody that binds TRGV9, comprising: (i) a VH comprising a VH CDR1, a VH CDR2, and a VH CDR3 having an amino acid sequence of a VH CDR1, a VH CDR2, and a VH CDR3, respectively, of a VH having an amino acid sequence of SEQ ID NO:1119; and (ii) a VL comprising a VL CDR1, a VL CDR2, and a VL CDR3 having an amino acid sequence of a VL CDR1, a VL CDR2, and a VL CDR3, respectively, of SEQ ID NO:1120. In one aspect, provided herein is an antibody that binds TRGV9, comprising a VH having an amino acid sequence of SEQ ID NO:1119. In one aspect, provided herein is an antibody that binds TRGV9, comprising a VL having an amino acid sequence of SEQ ID NO:1120. In one aspect, provided herein is an antibody that binds TRGV9, comprising a VH having an amino acid sequence of SEQ ID NO:1119, and a VL having an amino acid sequence of SEQ ID NO:1120. In one aspect, provided herein is an antibody that binds TRGV9, comprising a heavy chain having an amino acid sequence of SEQ ID NO:1121. In one aspect, provided herein is an antibody that binds TRGV9, comprising a light chain having an amino acid sequence of SEQ ID NO:1122. In one aspect, provided herein is an antibody that binds TRGV9, comprising a heavy chain having an amino acid sequence of SEQ ID NO:1121, and a light chain having an amino acid sequence of SEQ ID NO:1122. In one aspect, provided herein is an antibody that binds TRGV9, comprising a VH having an amino acid sequence having at least 95% identity to an amino acid sequence of SEQ ID NO:1119. In one aspect, provided herein is an antibody that binds TRGV9, comprising a VL having an amino acid sequence having at least 95% identity to an amino acid sequence of SEQ ID NO:1120. In one aspect, provided herein is an antibody that binds TRGV9, comprising a VH having an amino acid sequence having at least 95% identity to an amino acid sequence of SEQ ID NO:1119, and a VL having an amino acid sequence having at least 95% identity to an amino acid sequence of SEQ ID NO:1120. In one aspect, provided herein is an antibody that binds TRGV9, comprising a heavy chain having an amino acid sequence having at least 95% identity to an amino acid sequence of SEQ ID NO:1121. In one aspect, provided herein is an antibody that binds TRGV9, comprising a light chain having an amino acid sequence having at least 95% identity to an amino acid sequence of SEQ ID NO:1122. In one aspect, provided herein is an antibody that binds TRGV9, comprising a heavy chain having an amino acid sequence having at least 95% identity to an amino acid sequence of SEQ ID NO:1121, and a light chain having an amino acid sequence having at least 95% identity to an amino acid sequence of SEQ ID NO:1122.

[0132] In one aspect, provided herein is an antibody that binds TRGV9, comprising: (i) a VH comprising a VH CDR1, a VH CDR2, and a VH CDR3 having an amino acid sequence of SEQ ID NOs:1123, 1124, and 1125, respectively, and (ii) a VL comprising a VL CDR1, VL CDR2, and VL CDR3 having an amino acid sequence of SEQ ID NOs:1126, 1127, and 1128, respectively. In one aspect, provided herein is an antibody that binds TRGV9, comprising: (i) a VH comprising a VH CDR1, a VH CDR2, and a VH CDR3 having an amino acid sequence of SEQ ID NOs:1129, 1130, and 1131, respectively, and (ii) a VL comprising a VL CDR1, VL CDR2, and VL CDR3 having an amino acid sequence of SEQ ID NOs:1132, 1133, and 1134, respectively. In one aspect, provided herein is an antibody that binds TRGV9, comprising: (i) a VH comprising a VH CDR1, a VH CDR2, and a VH CDR3 having an amino acid sequence of SEQ ID NOs:1135, 1136, and 1137, respectively, and (ii) a VL comprising a VL CDR1, VL CDR2, and VL CDR3 having an amino acid sequence of SEQ ID NOs:1138, 1139, and 1140, respectively. In one aspect, provided herein is an antibody that binds TRGV9, comprising: (i) a VH comprising a VH CDR1, a VH CDR2, and a VH CDR3 having an amino acid sequence of SEQ ID NOs:1141, 1142, and 1143, respectively, and (ii) a VL comprising a VL CDR1, VL CDR2, and VL CDR3 having an amino acid sequence of SEQ ID NOs:1144, 1145, and 1146, respectively. In one aspect, provided herein is an antibody that binds TRGV9, comprising: (i) a VH comprising a VH CDR1, a VH CDR2, and a VH CDR3 having an amino acid sequence of SEQ ID NOs:1147, 1148, and 1149, respectively, and (ii) a VL comprising a VL CDR1, VL CDR2, and VL CDR3 having an amino acid sequence of SEQ ID NOs:1150, 1151, and 1152, respectively. In one aspect, provided herein is an antibody that binds TRGV9, comprising: (i) a VH comprising a VH CDR1, a VH CDR2, and a VH CDR3 having an amino acid sequence of a VH CDR1, a VH CDR2, and a VH CDR3, respectively, of a VH having an amino acid sequence of SEQ ID NO:1153; and (ii) a VL comprising a VL CDR1, a VL CDR2, and a VL CDR3 having an amino acid sequence of a VL CDR1, a VL CDR2, and a VL CDR3, respectively, of SEQ ID NO:1154. In one aspect, provided herein is an antibody that binds TRGV9, comprising a VH having an amino acid sequence of SEQ ID NO:1153. In one aspect, provided herein is an antibody that binds TRGV9, comprising a VL having an amino acid sequence of SEQ ID NO:1154. In one aspect, provided herein is an antibody that binds TRGV9, comprising a VH having an amino acid sequence of SEQ ID NO:1153, and a VL having an amino acid sequence of SEQ ID NO:1154. In one aspect, provided herein is an antibody that binds TRGV9, comprising a heavy chain having an amino acid sequence of SEQ ID NO:1155. In one aspect, provided herein is an antibody that binds TRGV9, comprising a light chain having an amino acid sequence of SEQ ID NO:1156. In one aspect, provided herein is an antibody that binds TRGV9, comprising a heavy chain having an amino acid sequence of SEQ ID NO:1155, and a light chain having an amino acid sequence of SEQ ID NO:1156. In one aspect, provided herein is an antibody that binds TRGV9, comprising a VH having an amino acid sequence having at least 95% identity to an amino acid sequence of SEQ ID NO:1153. In one aspect, provided herein is an antibody that binds TRGV9, comprising a VL having an amino acid sequence having at least 95% identity to an amino acid sequence of SEQ ID NO:1154. In one aspect, provided herein is an antibody that binds TRGV9, comprising a VH having an amino acid sequence having at least 95% identity to an amino acid sequence of SEQ ID NO:1153, and a VL having an amino acid sequence having at least 95% identity to an amino acid sequence of SEQ ID NO:1154. In one aspect, provided herein is an antibody that binds TRGV9, comprising a heavy chain having an amino acid sequence having at least 95% identity to an amino acid sequence of SEQ ID NO:1155. In one aspect, provided herein is an antibody that binds TRGV9, comprising a light chain having an amino acid sequence having at least 95% identity to an amino acid sequence of SEQ ID NO:1156. In one aspect, provided herein is an antibody that binds TRGV9, comprising a heavy chain having an amino acid sequence having at least 95% identity to an amino acid sequence of SEQ ID NO:1155, and a light chain having an amino acid sequence having at least 95% identity to an amino acid sequence of SEQ ID NO:1156.

[0133] In one aspect, provided herein is an antibody that binds TRGV9, comprising: (i) a VH comprising a VH CDR1, a VH CDR2, and a VH CDR3 having an amino acid sequence of SEQ ID NOs:1157, 1158, and 1159, respectively, and (ii) a VL comprising a VL CDR1, VL CDR2, and VL CDR3 having an amino acid sequence of SEQ ID NOs:1160, 1161, and 1162, respectively. In one aspect, provided herein is an antibody that binds TRGV9, comprising: (i) a VH comprising a VH CDR1, a VH CDR2, and a VH CDR3 having an amino acid sequence of SEQ ID NOs:1163, 1164, and 1165, respectively, and (ii) a VL comprising a VL CDR1, VL CDR2, and VL CDR3 having an amino acid sequence of SEQ ID NOs:1166, 1167, and 1168, respectively. In one aspect, provided herein is an antibody that binds TRGV9, comprising: (i) a VH comprising a VH CDR1, a VH CDR2, and a VH CDR3 having an amino acid sequence of SEQ ID NOs:1169, 1170, and 1171, respectively, and (ii) a VL comprising a VL CDR1, VL CDR2, and VL CDR3 having an amino acid sequence of SEQ ID NOs:1172, 1173, and 1174, respectively. In one aspect, provided herein is an antibody that binds TRGV9, comprising: (i) a VH comprising a VH CDR1, a VH CDR2, and a VH CDR3 having an amino acid sequence of SEQ ID NOs:1175, 1176, and 1177, respectively, and (ii) a VL comprising a VL CDR1, VL CDR2, and VL CDR3 having an amino acid sequence of SEQ ID NOs:1178, 1179, and 1180, respectively. In one aspect, provided herein is an antibody that binds TRGV9, comprising: (i) a VH comprising a VH CDR1, a VH CDR2, and a VH CDR3 having an amino acid sequence of SEQ ID NOs:1181, 1182, and 1183, respectively, and (ii) a VL comprising a VL CDR1, VL CDR2, and VL CDR3 having an amino acid sequence of SEQ ID NOs:1184, 1185, and 1186, respectively. In one aspect, provided herein is an antibody that binds TRGV9, comprising: (i) a VH comprising a VH CDR1, a VH CDR2, and a VH CDR3 having an amino acid sequence of a VH CDR1, a VH CDR2, and a VH CDR3, respectively, of a VH having an amino acid sequence of SEQ ID NO:1187; and (ii) a VL comprising a VL CDR1, a VL CDR2, and a VL CDR3 having an amino acid sequence of a VL CDR1, a VL CDR2, and a VL CDR3, respectively, of SEQ ID NO:1188. In one aspect, provided herein is an antibody that binds TRGV9, comprising a VH having an amino acid sequence of SEQ ID NO:1187. In one aspect, provided herein is an antibody that binds TRGV9, comprising a VL having an amino acid sequence of SEQ ID NO:1188. In one aspect, provided herein is an antibody that binds TRGV9, comprising a VH having an amino acid sequence of SEQ ID NO:1187, and a VL having an amino acid sequence of SEQ ID NO:1188. In one aspect, provided herein is an antibody that binds TRGV9, comprising a heavy chain having an amino acid sequence of SEQ ID NO:1189. In one aspect, provided herein is an antibody that binds TRGV9, comprising a light chain having an amino acid sequence of SEQ ID NO:1190. In one aspect, provided herein is an antibody that binds TRGV9, comprising a heavy chain having an amino acid sequence of SEQ ID NO:1189, and a light chain having an amino acid sequence of SEQ ID NO:1190. In one aspect, provided herein is an antibody that binds TRGV9, comprising a VH having an amino acid sequence having at least 95% identity to an amino acid sequence of SEQ ID NO:1187. In one aspect, provided herein is an antibody that binds TRGV9, comprising a VL having an amino acid sequence having at least 95% identity to an amino acid sequence of SEQ ID NO:1188. In one aspect, provided herein is an antibody that binds TRGV9, comprising a VH having an amino acid sequence having at least 95% identity to an amino acid sequence of SEQ ID NO:1187, and a VL having an amino acid sequence having at least 95% identity to an amino acid sequence of SEQ ID NO:1188. In one aspect, provided herein is an antibody that binds TRGV9, comprising a heavy chain having an amino acid sequence having at least 95% identity to an amino acid sequence of SEQ ID NO:1189. In one aspect, provided herein is an antibody that binds TRGV9, comprising a light chain having an amino acid sequence having at least 95% identity to an amino acid sequence of SEQ ID NO:1190. In one aspect, provided herein is an antibody that binds TRGV9, comprising a heavy chain having an amino acid sequence having at least 95% identity to an amino acid sequence of SEQ ID NO:1189, and a light chain having an amino acid sequence having at least 95% identity to an amino acid sequence of SEQ ID NO:1190.

[0134] In one aspect, provided herein is an antibody that binds TRGV9, comprising: (i) a VH comprising a VH CDR1, a VH CDR2, and a VH CDR3 having an amino acid sequence of SEQ ID NOs:1191, 1192, and 1193, respectively, and (ii) a VL comprising a VL CDR1, VL CDR2, and VL CDR3 having an amino acid sequence of SEQ ID NOs:1194, 1195, and 1196, respectively. In one aspect, provided herein is an antibody that binds TRGV9, comprising: (i) a VH comprising a VH CDR1, a VH CDR2, and a VH CDR3 having an amino acid sequence of SEQ ID NOs:1197, 1198, and 1199, respectively, and (ii) a VL comprising a VL CDR1, VL CDR2, and VL CDR3 having an amino acid sequence of SEQ ID NOs:1200, 1201, and 1202, respectively. In one aspect, provided herein is an antibody that binds TRGV9, comprising: (i) a VH comprising a VH CDR1, a VH CDR2, and a VH CDR3 having an amino acid sequence of SEQ ID NOs:1203, 1204, and 1205, respectively, and (ii) a VL comprising a VL CDR1, VL CDR2, and VL CDR3 having an amino acid sequence of SEQ ID NOs:1206, 1207, and 1208, respectively. In one aspect, provided herein is an antibody that binds TRGV9, comprising: (i) a VH comprising a VH CDR1, a VH CDR2, and a VH CDR3 having an amino acid sequence of SEQ ID NOs:1209, 1210, and 1211, respectively, and (ii) a VL comprising a VL CDR1, VL CDR2, and VL CDR3 having an amino acid sequence of SEQ ID NOs:1212, 1213, and 1214, respectively. In one aspect, provided herein is an antibody that binds TRGV9, comprising: (i) a VH comprising a VH CDR1, a VH CDR2, and a VH CDR3 having an amino acid sequence of SEQ ID NOs:1215, 1216, and 1217, respectively, and (ii) a VL comprising a VL CDR1, VL CDR2, and VL CDR3 having an amino acid sequence of SEQ ID NOs:1218, 1219, and 1220, respectively. In one aspect, provided herein is an antibody that binds TRGV9, comprising: (i) a VH comprising a VH CDR1, a VH CDR2, and a VH CDR3 having an amino acid sequence of a VH CDR1, a VH CDR2, and a VH CDR3, respectively, of a VH having an amino acid sequence of SEQ ID NO:1221; and (ii) a VL comprising a VL CDR1, a VL CDR2, and a VL CDR3 having an amino acid sequence of a VL CDR1, a VL CDR2, and a VL CDR3, respectively, of SEQ ID NO:1222. In one aspect, provided herein is an antibody that binds TRGV9, comprising a VH having an amino acid sequence of SEQ ID NO:1221. In one aspect, provided herein is an antibody that binds TRGV9, comprising a VL having an amino acid sequence of SEQ ID NO:1222. In one aspect, provided herein is an antibody that binds TRGV9, comprising a VH having an amino acid sequence of SEQ ID NO:1221, and a VL having an amino acid sequence of SEQ ID NO:1222. In one aspect, provided herein is an antibody that binds TRGV9, comprising a heavy chain having an amino acid sequence of SEQ ID NO:1223. In one aspect, provided herein is an antibody that binds TRGV9, comprising a light chain having an amino acid sequence of SEQ ID NO:1224. In one aspect, provided herein is an antibody that binds TRGV9, comprising a heavy chain having an amino acid sequence of SEQ ID NO:1223, and a light chain having an amino acid sequence of SEQ ID NO:1224. In one aspect, provided herein is an antibody that binds TRGV9, comprising a VH having an amino acid sequence having at least 95% identity to an amino acid sequence of SEQ ID NO:1221. In one aspect, provided herein is an antibody that binds TRGV9, comprising a VL having an amino acid sequence having at least 95% identity to an amino acid sequence of SEQ ID NO:1222. In one aspect, provided herein is an antibody that binds TRGV9, comprising a VH having an amino acid sequence having at least 95% identity to an amino acid sequence of SEQ ID NO:1221, and a VL having an amino acid sequence having at least 95% identity to an amino acid sequence of SEQ ID NO:1222. In one aspect, provided herein is an antibody that binds TRGV9, comprising a heavy chain having an amino acid sequence having at least 95% identity to an amino acid sequence of SEQ ID NO:1223. In one aspect, provided herein is an antibody that binds TRGV9, comprising a light chain having an amino acid sequence having at least 95% identity to an amino acid sequence of SEQ ID NO:1224. In one aspect, provided herein is an antibody that binds TRGV9, comprising a heavy chain having an amino acid sequence having at least 95% identity to an amino acid sequence of SEQ ID NO:1223, and a light chain having an amino acid sequence having at least 95% identity to an amino acid sequence of SEQ ID NO:1224.

[0135] In one aspect, provided herein is an antibody that binds TRGV9, comprising: (i) a VH comprising a VH CDR1, a VH CDR2, and a VH CDR3 having an amino acid sequence of SEQ ID NOs:1225, 1226, and 1227, respectively, and (ii) a VL comprising a VL CDR1, VL CDR2, and VL CDR3 having an amino acid sequence of SEQ ID NOs:1228, 1229, and 1230, respectively. In one aspect, provided herein is an antibody that binds TRGV9, comprising: (i) a VH comprising a VH CDR1, a VH CDR2, and a VH CDR3 having an amino acid sequence of SEQ ID NOs:1231, 1232, and 1233, respectively, and (ii) a VL comprising a VL CDR1, VL CDR2, and VL CDR3 having an amino acid sequence of SEQ ID NOs:1234, 1235, and 1236, respectively. In one aspect, provided herein is an antibody that binds TRGV9, comprising: (i) a VH comprising a VH CDR1, a VH CDR2, and a VH CDR3 having an amino acid sequence of SEQ ID NOs:1237, 1238, and 1239, respectively, and (ii) a VL comprising a VL CDR1, VL CDR2, and VL CDR3 having an amino acid sequence of SEQ ID NOs:1240, 1241, and 1242, respectively. In one aspect, provided herein is an antibody that binds TRGV9, comprising: (i) a VH comprising a VH CDR1, a VH CDR2, and a VH CDR3 having an amino acid sequence of SEQ ID NOs:1243, 1244, and 1245, respectively, and (ii) a VL comprising a VL CDR1, VL CDR2, and VL CDR3 having an amino acid sequence of SEQ ID NOs:1246, 1247, and 1248, respectively. In one aspect, provided herein is an antibody that binds TRGV9, comprising: (i) a VH comprising a VH CDR1, a VH CDR2, and a VH CDR3 having an amino acid sequence of SEQ ID NOs:1249, 1250, and 1251, respectively, and (ii) a VL comprising a VL CDR1, VL CDR2, and VL CDR3 having an amino acid sequence of SEQ ID NOs:1252, 1253, and 1254, respectively. In one aspect, provided herein is an antibody that binds TRGV9, comprising: (i) a VH comprising a VH CDR1, a VH CDR2, and a VH CDR3 having an amino acid sequence of a VH CDR1, a VH CDR2, and a VH CDR3, respectively, of a VH having an amino acid sequence of SEQ ID NO:1255; and (ii) a VL comprising a VL CDR1, a VL CDR2, and a VL CDR3 having an amino acid sequence of a VL CDR1, a VL CDR2, and a VL CDR3, respectively, of SEQ ID NO:1256. In one aspect, provided herein is an antibody that binds TRGV9, comprising a VH having an amino acid sequence of SEQ ID NO:1255. In one aspect, provided herein is an antibody that binds TRGV9, comprising a VL having an amino acid sequence of SEQ ID NO:1256. In one aspect, provided herein is an antibody that binds TRGV9, comprising a VH having an amino acid sequence of SEQ ID NO:1255, and a VL having an amino acid sequence of SEQ ID NO:1256. In one aspect, provided herein is an antibody that binds TRGV9, comprising a heavy chain having an amino acid sequence of SEQ ID NO:1257. In one aspect, provided herein is an antibody that binds TRGV9, comprising a light chain having an amino acid sequence of SEQ ID NO:1258. In one aspect, provided herein is an antibody that binds TRGV9, comprising a heavy chain having an amino acid sequence of SEQ ID NO:1257, and a light chain having an amino acid sequence of SEQ ID NO:1258. In one aspect, provided herein is an antibody that binds TRGV9, comprising a VH having an amino acid sequence having at least 95% identity to an amino acid sequence of SEQ ID NO:1255. In one aspect, provided herein is an antibody that binds TRGV9, comprising a VL having an amino acid sequence having at least 95% identity to an amino acid sequence of SEQ ID NO:1256. In one aspect, provided herein is an antibody that binds TRGV9, comprising a VH having an amino acid sequence having at least 95% identity to an amino acid sequence of SEQ ID NO:1255, and a VL having an amino acid sequence having at least 95% identity to an amino acid sequence of SEQ ID NO:1256. In one aspect, provided herein is an antibody that binds TRGV9, comprising a heavy chain having an amino acid sequence having at least 95% identity to an amino acid sequence of SEQ ID NO:1257. In one aspect, provided herein is an antibody that binds TRGV9, comprising a light chain having an amino acid sequence having at least 95% identity to an amino acid sequence of SEQ ID NO:1258. In one aspect, provided herein is an antibody that binds TRGV9, comprising a heavy chain having an amino acid sequence having at least 95% identity to an amino acid sequence of SEQ ID NO:1257, and a light chain having an amino acid sequence having at least 95% identity to an amino acid sequence of SEQ ID NO:1258.

[0136] In one aspect, provided herein is an antibody that binds TRGV9, comprising: (i) a VH comprising a VH CDR1, a VH CDR2, and a VH CDR3 having an amino acid sequence of SEQ ID NOs:1259, 1260, and 1261, respectively, and (ii) a VL comprising a VL CDR1, VL CDR2, and VL CDR3 having an amino acid sequence of SEQ ID NOs:1262, 1263, and 1264, respectively. In one aspect, provided herein is an antibody that binds TRGV9, comprising: (i) a VH comprising a VH CDR1, a VH CDR2, and a VH CDR3 having an amino acid sequence of SEQ ID NOs:1265, 1266, and 1267, respectively, and (ii) a VL comprising a VL CDR1, VL CDR2, and VL CDR3 having an amino acid sequence of SEQ ID NOs:1268, 1269, and 1270, respectively. In one aspect, provided herein is an antibody that binds TRGV9, comprising: (i) a VH comprising a VH CDR1, a VH CDR2, and a VH CDR3 having an amino acid sequence of SEQ ID NOs:1271, 1272, and 1273, respectively, and (ii) a VL comprising a VL CDR1, VL CDR2, and VL CDR3 having an amino acid sequence of SEQ ID NOs:1274, 1275, and 1276, respectively. In one aspect, provided herein is an antibody that binds TRGV9, comprising: (i) a VH comprising a VH CDR1, a VH CDR2, and a VH CDR3 having an amino acid sequence of SEQ ID NOs:1277, 1278, and 1279, respectively, and (ii) a VL comprising a VL CDR1, VL CDR2, and VL CDR3 having an amino acid sequence of SEQ ID NOs:1280, 1281, and 1282, respectively. In one aspect, provided herein is an antibody that binds TRGV9, comprising: (i) a VH comprising a VH CDR1, a VH CDR2, and a VH CDR3 having an amino acid sequence of SEQ ID NOs:1283, 1284, and 1285, respectively, and (ii) a VL comprising a VL CDR1, VL CDR2, and VL CDR3 having an amino acid sequence of SEQ ID NOs:1286, 1287, and 1288, respectively. In one aspect, provided herein is an antibody that binds TRGV9, comprising: (i) a VH comprising a VH CDR1, a VH CDR2, and a VH CDR3 having an amino acid sequence of a VH CDR1, a VH CDR2, and a VH CDR3, respectively, of a VH having an amino acid sequence of SEQ ID NO:1289; and (ii) a VL comprising a VL CDR1, a VL CDR2, and a VL CDR3 having an amino acid sequence of a VL CDR1, a VL CDR2, and a VL CDR3, respectively, of SEQ ID NO:1290. In one aspect, provided herein is an antibody that binds TRGV9, comprising a VH having an amino acid sequence of SEQ ID NO:1289. In one aspect, provided herein is an antibody that binds TRGV9, comprising a VL having an amino acid sequence of SEQ ID NO:1290. In one aspect, provided herein is an antibody that binds TRGV9, comprising a VH having an amino acid sequence of SEQ ID NO:1289, and a VL having an amino acid sequence of SEQ ID NO:1290. In one aspect, provided herein is an antibody that binds TRGV9, comprising a heavy chain having an amino acid sequence of SEQ ID NO:1291. In one aspect, provided herein is an antibody that binds TRGV9, comprising a light chain having an amino acid sequence of SEQ ID NO:1292. In one aspect, provided herein is an antibody that binds TRGV9, comprising a heavy chain having an amino acid sequence of SEQ ID NO:1291, and a light chain having an amino acid sequence of SEQ ID NO:1292. In one aspect, provided herein is an antibody that binds TRGV9, comprising a VH having an amino acid sequence having at least 95% identity to an amino acid sequence of SEQ ID NO:1289. In one aspect, provided herein is an antibody that binds TRGV9, comprising a VL having an amino acid sequence having at least 95% identity to an amino acid sequence of SEQ ID NO:1290. In one aspect, provided herein is an antibody that binds TRGV9, comprising a VH having an amino acid sequence having at least 95% identity to an amino acid sequence of SEQ ID NO:1289, and a VL having an amino acid sequence having at least 95% identity to an amino acid sequence of SEQ ID NO:1290. In one aspect, provided herein is an antibody that binds TRGV9, comprising a heavy chain having an amino acid sequence having at least 95% identity to an amino acid sequence of SEQ ID NO:1291. In one aspect, provided herein is an antibody that binds TRGV9, comprising a light chain having an amino acid sequence having at least 95% identity to an amino acid sequence of SEQ ID NO:1292. In one aspect, provided herein is an antibody that binds TRGV9, comprising a heavy chain having an amino acid sequence having at least 95% identity to an amino acid sequence of SEQ ID NO:1291, and a light chain having an amino acid sequence having at least 95% identity to an amino acid sequence of SEQ ID NO:1292.

[0137] In one aspect, provided herein is an antibody that binds TRGV9, comprising: (i) a VH comprising a VH CDR1, a VH CDR2, and a VH CDR3 having an amino acid sequence of SEQ ID NOs:1293, 1294, and 1295, respectively, and (ii) a VL comprising a VL CDR1, VL CDR2, and VL CDR3 having an amino acid sequence of SEQ ID NOs:1296, 1297, and 1298, respectively. In one aspect, provided herein is an antibody that binds TRGV9, comprising: (i) a VH comprising a VH CDR1, a VH CDR2, and a VH CDR3 having an amino acid sequence of SEQ ID NOs:1299, 1300, and 1301, respectively, and (ii) a VL comprising a VL CDR1, VL CDR2, and VL CDR3 having an amino acid sequence of SEQ ID NOs:1302, 1303, and 1304, respectively. In one aspect, provided herein is an antibody that binds TRGV9, comprising: (i) a VH comprising a VH CDR1, a VH CDR2, and a VH CDR3 having an amino acid sequence of SEQ ID NOs:1305, 1306, and 1307, respectively, and (ii) a VL comprising a VL CDR1, VL CDR2, and VL CDR3 having an amino acid sequence of SEQ ID NOs:1308, 1309, and 1310, respectively. In one aspect, provided herein is an antibody that binds TRGV9, comprising: (i) a VH comprising a VH CDR1, a VH CDR2, and a VH CDR3 having an amino acid sequence of SEQ ID NOs:1311, 1312, and 1313, respectively, and (ii) a VL comprising a VL CDR1, VL CDR2, and VL CDR3 having an amino acid sequence of SEQ ID NOs:1314, 1315, and 1316, respectively. In one aspect, provided herein is an antibody that binds TRGV9, comprising: (i) a VH comprising a VH CDR1, a VH CDR2, and a VH CDR3 having an amino acid sequence of SEQ ID NOs:1317, 1318, and 1319, respectively, and (ii) a VL comprising a VL CDR1, VL CDR2, and VL CDR3 having an amino acid sequence of SEQ ID NOs:1320, 1321, and 1322, respectively. In one aspect, provided herein is an antibody that binds TRGV9, comprising: (i) a VH comprising a VH CDR1, a VH CDR2, and a VH CDR3 having an amino acid sequence of a VH CDR1, a VH CDR2, and a VH CDR3, respectively, of a VH having an amino acid sequence of SEQ ID NO:1323; and (ii) a VL comprising a VL CDR1, a VL CDR2, and a VL CDR3 having an amino acid sequence of a VL CDR1, a VL CDR2, and a VL CDR3, respectively, of SEQ ID NO:1324. In one aspect, provided herein is an antibody that binds TRGV9, comprising a VH having an amino acid sequence of SEQ ID NO:1323. In one aspect, provided herein is an antibody that binds TRGV9, comprising a VL having an amino acid sequence of SEQ ID NO:1324. In one aspect, provided herein is an antibody that binds TRGV9, comprising a VH having an amino acid sequence of SEQ ID NO:1323, and a VL having an amino acid sequence of SEQ ID NO:1324. In one aspect, provided herein is an antibody that binds TRGV9, comprising a heavy chain having an amino acid sequence of SEQ ID NO:1325. In one aspect, provided herein is an antibody that binds TRGV9, comprising a light chain having an amino acid sequence of SEQ ID NO:1326. In one aspect, provided herein is an antibody that binds TRGV9, comprising a heavy chain having an amino acid sequence of SEQ ID NO:1325, and a light chain having an amino acid sequence of SEQ ID NO:1326. In one aspect, provided herein is an antibody that binds TRGV9, comprising a VH having an amino acid sequence having at least 95% identity to an amino acid sequence of SEQ ID NO:1323. In one aspect, provided herein is an antibody that binds TRGV9, comprising a VL having an amino acid sequence having at least 95% identity to an amino acid sequence of SEQ ID NO:1324. In one aspect, provided herein is an antibody that binds TRGV9, comprising a VH having an amino acid sequence having at least 95% identity to an amino acid sequence of SEQ ID NO:1323, and a VL having an amino acid sequence having at least 95% identity to an amino acid sequence of SEQ ID NO:1324. In one aspect, provided herein is an antibody that binds TRGV9, comprising a heavy chain having an amino acid sequence having at least 95% identity to an amino acid sequence of SEQ ID NO:1325. In one aspect, provided herein is an antibody that binds TRGV9, comprising a light chain having an amino acid sequence having at least 95% identity to an amino acid sequence of SEQ ID NO:1326. In one aspect, provided herein is an antibody that binds TRGV9, comprising a heavy chain having an amino acid sequence having at least 95% identity to an amino acid sequence of SEQ ID NO:1325, and a light chain having an amino acid sequence having at least 95% identity to an amino acid sequence of SEQ ID NO:1326.

[0138] In one aspect, provided herein is an antibody that binds TRGV9, comprising: (i) a VH comprising a VH CDR1, a VH CDR2, and a VH CDR3 having an amino acid sequence of SEQ ID NOs:1327, 1328, and 1329, respectively, and (ii) a VL comprising a VL CDR1, VL CDR2, and VL CDR3 having an amino acid sequence of SEQ ID NOs:1330, 1331, and 1332, respectively. In one aspect, provided herein is an antibody that binds TRGV9, comprising: (i) a VH comprising a VH CDR1, a VH CDR2, and a VH CDR3 having an amino acid sequence of SEQ ID NOs:1333, 1334, and 1335, respectively, and (ii) a VL comprising a VL CDR1, VL CDR2, and VL CDR3 having an amino acid sequence of SEQ ID NOs:1336, 1337, and 1338, respectively. In one aspect, provided herein is an antibody that binds TRGV9, comprising: (i) a VH comprising a VH CDR1, a VH CDR2, and a VH CDR3 having an amino acid sequence of SEQ ID NOs:1339, 1340, and 1341, respectively, and (ii) a VL comprising a VL CDR1, VL CDR2, and VL CDR3 having an amino acid sequence of SEQ ID NOs:1342, 1343, and 1344, respectively. In one aspect, provided herein is an antibody that binds TRGV9, comprising: (i) a VH comprising a VH CDR1, a VH CDR2, and a VH CDR3 having an amino acid sequence of SEQ ID NOs:1345, 1346, and 1347, respectively, and (ii) a VL comprising a VL CDR1, VL CDR2, and VL CDR3 having an amino acid sequence of SEQ ID NOs:1348, 1349, and 1350, respectively. In one aspect, provided herein is an antibody that binds TRGV9, comprising: (i) a VH comprising a VH CDR1, a VH CDR2, and a VH CDR3 having an amino acid sequence of SEQ ID NOs:1351, 1352, and 1353, respectively, and (ii) a VL comprising a VL CDR1, VL CDR2, and VL CDR3 having an amino acid sequence of SEQ ID NOs:1354, 1355, and 1356, respectively. In one aspect, provided herein is an antibody that binds TRGV9, comprising: (i) a VH comprising a VH CDR1, a VH CDR2, and a VH CDR3 having an amino acid sequence of a VH CDR1, a VH CDR2, and a VH CDR3, respectively, of a VH having an amino acid sequence of SEQ ID NO:1357; and (ii) a VL comprising a VL CDR1, a VL CDR2, and a VL CDR3 having an amino acid sequence of a VL CDR1, a VL CDR2, and a VL CDR3, respectively, of SEQ ID NO:1358. In one aspect, provided herein is an antibody that binds TRGV9, comprising a VH having an amino acid sequence of SEQ ID NO:1357. In one aspect, provided herein is an antibody that binds TRGV9, comprising a VL having an amino acid sequence of SEQ ID NO:1358. In one aspect, provided herein is an antibody that binds TRGV9, comprising a VH having an amino acid sequence of SEQ ID NO:1357, and a VL having an amino acid sequence of SEQ ID NO:1358. In one aspect, provided herein is an antibody that binds TRGV9, comprising a heavy chain having an amino acid sequence of SEQ ID NO:1359. In one aspect, provided herein is an antibody that binds TRGV9, comprising a light chain having an amino acid sequence of SEQ ID NO:1360. In one aspect, provided herein is an antibody that binds TRGV9, comprising a heavy chain having an amino acid sequence of SEQ ID NO:1359, and a light chain having an amino acid sequence of SEQ ID NO:1360. In one aspect, provided herein is an antibody that binds TRGV9, comprising a VH having an amino acid sequence having at least 95% identity to an amino acid sequence of SEQ ID NO:1357. In one aspect, provided herein is an antibody that binds TRGV9, comprising a VL having an amino acid sequence having at least 95% identity to an amino acid sequence of SEQ ID NO:1358. In one aspect, provided herein is an antibody that binds TRGV9, comprising a VH having an amino acid sequence having at least 95% identity to an amino acid sequence of SEQ ID NO:1357, and a VL having an amino acid sequence having at least 95% identity to an amino acid sequence of SEQ ID NO:1358. In one aspect, provided herein is an antibody that binds TRGV9, comprising a heavy chain having an amino acid sequence having at least 95% identity to an amino acid sequence of SEQ ID NO:1359. In one aspect, provided herein is an antibody that binds TRGV9, comprising a light chain having an amino acid sequence having at least 95% identity to an amino acid sequence of SEQ ID NO:1360. In one aspect, provided herein is an antibody that binds TRGV9, comprising a heavy chain having an amino acid sequence having at least 95% identity to an amino acid sequence of SEQ ID NO:1359, and a light chain having an amino acid sequence having at least 95% identity to an amino acid sequence of SEQ ID NO:1360.

[0139] In one aspect, provided herein is an antibody that binds TRGV9, comprising: (i) a VH comprising a VH CDR1, a VH CDR2, and a VH CDR3 having an amino acid sequence of SEQ ID NOs:1361, 1362, and 1363, respectively, and (ii) a VL comprising a VL CDR1, VL CDR2, and VL CDR3 having an amino acid sequence of SEQ ID NOs:1364, 1365, and 1366, respectively. In one aspect, provided herein is an antibody that binds TRGV9, comprising: (i) a VH comprising a VH CDR1, a VH CDR2, and a VH CDR3 having an amino acid sequence of SEQ ID NOs:1367, 1368, and 1369, respectively, and (ii) a VL comprising a VL CDR1, VL CDR2, and VL CDR3 having an amino acid sequence of SEQ ID NOs:1370, 1371, and 1372, respectively. In one aspect, provided herein is an antibody that binds TRGV9, comprising: (i) a VH comprising a VH CDR1, a VH CDR2, and a VH CDR3 having an amino acid sequence of SEQ ID NOs:1373, 1374, and 1375, respectively, and (ii) a VL comprising a VL CDR1, VL CDR2, and VL CDR3 having an amino acid sequence of SEQ ID NOs:1376, 1377, and 1378, respectively. In one aspect, provided herein is an antibody that binds TRGV9, comprising: (i) a VH comprising a VH CDR1, a VH CDR2, and a VH CDR3 having an amino acid sequence of SEQ ID NOs:1379, 1380, and 1381, respectively, and (ii) a VL comprising a VL CDR1, VL CDR2, and VL CDR3 having an amino acid sequence of SEQ ID NOs:1382, 1383, and 1384, respectively. In one aspect, provided herein is an antibody that binds TRGV9, comprising: (i) a VH comprising a VH CDR1, a VH CDR2, and a VH CDR3 having an amino acid sequence of SEQ ID NOs:1385, 1386, and 1387, respectively, and (ii) a VL comprising a VL CDR1, VL CDR2, and VL CDR3 having an amino acid sequence of SEQ ID NOs:1388, 1389, and 1390, respectively. In one aspect, provided herein is an antibody that binds TRGV9, comprising: (i) a VH comprising a VH CDR1, a VH CDR2, and a VH CDR3 having an amino acid sequence of a VH CDR1, a VH CDR2, and a VH CDR3, respectively, of a VH having an amino acid sequence of SEQ ID NO:1391; and (ii) a VL comprising a VL CDR1, a VL CDR2, and a VL CDR3 having an amino acid sequence of a VL CDR1, a VL CDR2, and a VL CDR3, respectively, of SEQ ID NO:1392. In one aspect, provided herein is an antibody that binds TRGV9, comprising a VH having an amino acid sequence of SEQ ID NO:1391. In one aspect, provided herein is an antibody that binds TRGV9, comprising a VL having an amino acid sequence of SEQ ID NO:1392. In one aspect, provided herein is an antibody that binds TRGV9, comprising a VH having an amino acid sequence of SEQ ID NO:1391, and a VL having an amino acid sequence of SEQ ID NO:1392. In one aspect, provided herein is an antibody that binds TRGV9, comprising a heavy chain having an amino acid sequence of SEQ ID NO:1393. In one aspect, provided herein is an antibody that binds TRGV9, comprising a light chain having an amino acid sequence of SEQ ID NO:1394. In one aspect, provided herein is an antibody that binds TRGV9, comprising a heavy chain having an amino acid sequence of SEQ ID NO:1393, and a light chain having an amino acid sequence of SEQ ID NO:1394. In one aspect, provided herein is an antibody that binds TRGV9, comprising a VH having an amino acid sequence having at least 95% identity to an amino acid sequence of SEQ ID NO:1391. In one aspect, provided herein is an antibody that binds TRGV9, comprising a VL having an amino acid sequence having at least 95% identity to an amino acid sequence of SEQ ID NO:1392. In one aspect, provided herein is an antibody that binds TRGV9, comprising a VH having an amino acid sequence having at least 95% identity to an amino acid sequence of SEQ ID NO:1391, and a VL having an amino acid sequence having at least 95% identity to an amino acid sequence of SEQ ID NO:1392. In one aspect, provided herein is an antibody that binds TRGV9, comprising a heavy chain having an amino acid sequence having at least 95% identity to an amino acid sequence of SEQ ID NO:1393. In one aspect, provided herein is an antibody that binds TRGV9, comprising a light chain having an amino acid sequence having at least 95% identity to an amino acid sequence of SEQ ID NO:1394. In one aspect, provided herein is an antibody that binds TRGV9, comprising a heavy chain having an amino acid sequence having at least 95% identity to an amino acid sequence of SEQ ID NO:1393, and a light chain having an amino acid sequence having at least 95% identity to an amino acid sequence of SEQ ID NO:1394.

[0140] In one aspect, provided herein is an antibody that binds TRGV9, comprising: (i) a VH comprising a VH CDR1, a VH CDR2, and a VH CDR3 having an amino acid sequence of SEQ ID NOs:1395, 1396, and 1397, respectively, and (ii) a VL comprising a VL CDR1, VL CDR2, and VL CDR3 having an amino acid sequence of SEQ ID NOs:1398, 1399, and 1400, respectively. In one aspect, provided herein is an antibody that binds TRGV9, comprising: (i) a VH comprising a VH CDR1, a VH CDR2, and a VH CDR3 having an amino acid sequence of SEQ ID NOs:1401, 1402, and 1403, respectively, and (ii) a VL comprising a VL CDR1, VL CDR2, and VL CDR3 having an amino acid sequence of SEQ ID NOs:1404, 1405, and 1406, respectively. In one aspect, provided herein is an antibody that binds TRGV9, comprising: (i) a VH comprising a VH CDR1, a VH CDR2, and a VH CDR3 having an amino acid sequence of SEQ ID NOs:1407, 1408, and 1409, respectively, and (ii) a VL comprising a VL CDR1, VL CDR2, and VL CDR3 having an amino acid sequence of SEQ ID NOs:1410, 1411, and 1412, respectively. In one aspect, provided herein is an antibody that binds TRGV9, comprising: (i) a VH comprising a VH CDR1, a VH CDR2, and a VH CDR3 having an amino acid sequence of SEQ ID NOs:1413, 1414, and 1415, respectively, and (ii) a VL comprising a VL CDR1, VL CDR2, and VL CDR3 having an amino acid sequence of SEQ ID NOs:1416, 1417, and 1418, respectively. In one aspect, provided herein is an antibody that binds TRGV9, comprising: (i) a VH comprising a VH CDR1, a VH CDR2, and a VH CDR3 having an amino acid sequence of SEQ ID NOs:1419, 1420, and 1421, respectively, and (ii) a VL comprising a VL CDR1, VL CDR2, and VL CDR3 having an amino acid sequence of SEQ ID NOs:1422, 1423, and 1424, respectively. In one aspect, provided herein is an antibody that binds TRGV9, comprising: (i) a VH comprising a VH CDR1, a VH CDR2, and a VH CDR3 having an amino acid sequence of a VH CDR1, a VH CDR2, and a VH CDR3, respectively, of a VH having an amino acid sequence of SEQ ID NO:1425; and (ii) a VL comprising a VL CDR1, a VL CDR2, and a VL CDR3 having an amino acid sequence of a VL CDR1, a VL CDR2, and a VL CDR3, respectively, of SEQ ID NO:1426. In one aspect, provided herein is an antibody that binds TRGV9, comprising a VH having an amino acid sequence of SEQ ID NO:1425. In one aspect, provided herein is an antibody that binds TRGV9, comprising a VL having an amino acid sequence of SEQ ID NO:1426. In one aspect, provided herein is an antibody that binds TRGV9, comprising a VH having an amino acid sequence of SEQ ID NO:1425, and a VL having an amino acid sequence of SEQ ID NO:1426. In one aspect, provided herein is an antibody that binds TRGV9, comprising a heavy chain having an amino acid sequence of SEQ ID NO:1427. In one aspect, provided herein is an antibody that binds TRGV9, comprising a light chain having an amino acid sequence of SEQ ID NO:1428. In one aspect, provided herein is an antibody that binds TRGV9, comprising a heavy chain having an amino acid sequence of SEQ ID NO:1427, and a light chain having an amino acid sequence of SEQ ID NO:1428. In one aspect, provided herein is an antibody that binds TRGV9, comprising a VH having an amino acid sequence having at least 95% identity to an amino acid sequence of SEQ ID NO:1425. In one aspect, provided herein is an antibody that binds TRGV9, comprising a VL having an amino acid sequence having at least 95% identity to an amino acid sequence of SEQ ID NO:1426. In one aspect, provided herein is an antibody that binds TRGV9, comprising a VH having an amino acid sequence having at least 95% identity to an amino acid sequence of SEQ ID NO:1425, and a VL having an amino acid sequence having at least 95% identity to an amino acid sequence of SEQ ID NO:1426. In one aspect, provided herein is an antibody that binds TRGV9, comprising a heavy chain having an amino acid sequence having at least 95% identity to an amino acid sequence of SEQ ID NO:1427. In one aspect, provided herein is an antibody that binds TRGV9, comprising a light chain having an amino acid sequence having at least 95% identity to an amino acid sequence of SEQ ID NO:1428. In one aspect, provided herein is an antibody that binds TRGV9, comprising a heavy chain having an amino acid sequence having at least 95% identity to an amino acid sequence of SEQ ID NO:1427, and a light chain having an amino acid sequence having at least 95% identity to an amino acid sequence of SEQ ID NO:1428.

[0141] In one aspect, provided herein is an antibody that binds TRGV9, comprising: (i) a VH comprising a VH CDR1, a VH CDR2, and a VH CDR3 having an amino acid sequence of SEQ ID NOs:1429, 1430, and 1431, respectively, and (ii) a VL comprising a VL CDR1, VL CDR2, and VL CDR3 having an amino acid sequence of SEQ ID NOs:1432, 1433, and 1434, respectively. In one aspect, provided herein is an antibody that binds TRGV9, comprising: (i) a VH comprising a VH CDR1, a VH CDR2, and a VH CDR3 having an amino acid sequence of SEQ ID NOs:1435, 1436, and 1437, respectively, and (ii) a VL comprising a VL CDR1, VL CDR2, and VL CDR3 having an amino acid sequence of SEQ ID NOs:1438, 1439, and 1440, respectively. In one aspect, provided herein is an antibody that binds TRGV9, comprising: (i) a VH comprising a VH CDR1, a VH CDR2, and a VH CDR3 having an amino acid sequence of SEQ ID NOs:1441, 1442, and 1443, respectively, and (ii) a VL comprising a VL CDR1, VL CDR2, and VL CDR3 having an amino acid sequence of SEQ ID NOs:1444, 1445, and 1446, respectively. In one aspect, provided herein is an antibody that binds TRGV9, comprising: (i) a VH comprising a VH CDR1, a VH CDR2, and a VH CDR3 having an amino acid sequence of SEQ ID NOs:1447, 1448, and 1449, respectively, and (ii) a VL comprising a VL CDR1, VL CDR2, and VL CDR3 having an amino acid sequence of SEQ ID NOs:1450, 1451, and 1452, respectively. In one aspect, provided herein is an antibody that binds TRGV9, comprising: (i) a VH comprising a VH CDR1, a VH CDR2, and a VH CDR3 having an amino acid sequence of SEQ ID NOs:1453, 1454, and 1455, respectively, and (ii) a VL comprising a VL CDR1, VL CDR2, and VL CDR3 having an amino acid sequence of SEQ ID NOs:1456, 1457, and 1458, respectively. In one aspect, provided herein is an antibody that binds TRGV9, comprising: (i) a VH comprising a VH CDR1, a VH CDR2, and a VH CDR3 having an amino acid sequence of a VH CDR1, a VH CDR2, and a VH CDR3, respectively, of a VH having an amino acid sequence of SEQ ID NO:1459; and (ii) a VL comprising a VL CDR1, a VL CDR2, and a VL CDR3 having an amino acid sequence of a VL CDR1, a VL CDR2, and a VL CDR3, respectively, of SEQ ID NO:1460. In one aspect, provided herein is an antibody that binds TRGV9, comprising a VH having an amino acid sequence of SEQ ID NO:1459. In one aspect, provided herein is an antibody that binds TRGV9, comprising a VL having an amino acid sequence of SEQ ID NO:1460. In one aspect, provided herein is an antibody that binds TRGV9, comprising a VH having an amino acid sequence of SEQ ID NO:1459, and a VL having an amino acid sequence of SEQ ID NO:1460. In one aspect, provided herein is an antibody that binds TRGV9, comprising a heavy chain having an amino acid sequence of SEQ ID NO:1461. In one aspect, provided herein is an antibody that binds TRGV9, comprising a light chain having an amino acid sequence of SEQ ID NO:1462. In one aspect, provided herein is an antibody that binds TRGV9, comprising a heavy chain having an amino acid sequence of SEQ ID NO:1461, and a light chain having an amino acid sequence of SEQ ID NO:1462. In one aspect, provided herein is an antibody that binds TRGV9, comprising a VH having an amino acid sequence having at least 95% identity to an amino acid sequence of SEQ ID NO:1459. In one aspect, provided herein is an antibody that binds TRGV9, comprising a VL having an amino acid sequence having at least 95% identity to an amino acid sequence of SEQ ID NO:1460. In one aspect, provided herein is an antibody that binds TRGV9, comprising a VH having an amino acid sequence having at least 95% identity to an amino acid sequence of SEQ ID NO:1459, and a VL having an amino acid sequence having at least 95% identity to an amino acid sequence of SEQ ID NO:1460. In one aspect, provided herein is an antibody that binds TRGV9, comprising a heavy chain having an amino acid sequence having at least 95% identity to an amino acid sequence of SEQ ID NO:1461. In one aspect, provided herein is an antibody that binds TRGV9, comprising a light chain having an amino acid sequence having at least 95% identity to an amino acid sequence of SEQ ID NO:1462. In one aspect, provided herein is an antibody that binds TRGV9, comprising a heavy chain having an amino acid sequence having at least 95% identity to an amino acid sequence of SEQ ID NO:1461, and a light chain having an amino acid sequence having at least 95% identity to an amino acid sequence of SEQ ID NO:1462.

[0142] In one aspect, provided herein is an antibody that binds TRGV9, comprising: (i) a VH comprising a VH CDR1, a VH CDR2, and a VH CDR3 having an amino acid sequence of SEQ ID NOs:1463, 1464, and 1465, respectively, and (ii) a VL comprising a VL CDR1, VL CDR2, and VL CDR3 having an amino acid sequence of SEQ ID NOs:1466, 1467, and 1468, respectively. In one aspect, provided herein is an antibody that binds TRGV9, comprising: (i) a VH comprising a VH CDR1, a VH CDR2, and a VH CDR3 having an amino acid sequence of SEQ ID NOs:1469, 1470, and 1471, respectively, and (ii) a VL comprising a VL CDR1, VL CDR2, and VL CDR3 having an amino acid sequence of SEQ ID NOs:1472, 1473, and 1474, respectively. In one aspect, provided herein is an antibody that binds TRGV9, comprising: (i) a VH comprising a VH CDR1, a VH CDR2, and a VH CDR3 having an amino acid sequence of SEQ ID NOs:1475, 1476, and 1477, respectively, and (ii) a VL comprising a VL CDR1, VL CDR2, and VL CDR3 having an amino acid sequence of SEQ ID NOs:1478, 1479, and 1480, respectively. In one aspect, provided herein is an antibody that binds TRGV9, comprising: (i) a VH comprising a VH CDR1, a VH CDR2, and a VH CDR3 having an amino acid sequence of SEQ ID NOs:1481, 1482, and 1483, respectively, and (ii) a VL comprising a VL CDR1, VL CDR2, and VL CDR3 having an amino acid sequence of SEQ ID NOs:1484, 1485, and 1486, respectively. In one aspect, provided herein is an antibody that binds TRGV9, comprising: (i) a VH comprising a VH CDR1, a VH CDR2, and a VH CDR3 having an amino acid sequence of SEQ ID NOs:1487, 1488, and 1489, respectively, and (ii) a VL comprising a VL CDR1, VL CDR2, and VL CDR3 having an amino acid sequence of SEQ ID NOs:1490, 1491, and 1492, respectively. In one aspect, provided herein is an antibody that binds TRGV9, comprising: (i) a VH comprising a VH CDR1, a VH CDR2, and a VH CDR3 having an amino acid sequence of a VH CDR1, a VH CDR2, and a VH CDR3, respectively, of a VH having an amino acid sequence of SEQ ID NO:1493; and (ii) a VL comprising a VL CDR1, a VL CDR2, and a VL CDR3 having an amino acid sequence of a VL CDR1, a VL CDR2, and a VL CDR3, respectively, of SEQ ID NO:1494. In one aspect, provided herein is an antibody that binds TRGV9, comprising a VH having an amino acid sequence of SEQ ID NO:1493. In one aspect, provided herein is an antibody that binds TRGV9, comprising a VL having an amino acid sequence of SEQ ID NO:1494. In one aspect, provided herein is an antibody that binds TRGV9, comprising a VH having an amino acid sequence of SEQ ID NO:1493, and a VL having an amino acid sequence of SEQ ID NO:1494. In one aspect, provided herein is an antibody that binds TRGV9, comprising a heavy chain having an amino acid sequence of SEQ ID NO:1495. In one aspect, provided herein is an antibody that binds TRGV9, comprising a light chain having an amino acid sequence of SEQ ID NO:1496. In one aspect, provided herein is an antibody that binds TRGV9, comprising a heavy chain having an amino acid sequence of SEQ ID NO:1495, and a light chain having an amino acid sequence of SEQ ID NO:1496. In one aspect, provided herein is an antibody that binds TRGV9, comprising a VH having an amino acid sequence having at least 95% identity to an amino acid sequence of SEQ ID NO:1493. In one aspect, provided herein is an antibody that binds TRGV9, comprising a VL having an amino acid sequence having at least 95% identity to an amino acid sequence of SEQ ID NO:1494. In one aspect, provided herein is an antibody that binds TRGV9, comprising a VH having an amino acid sequence having at least 95% identity to an amino acid sequence of SEQ ID NO:1493, and a VL having an amino acid sequence having at least 95% identity to an amino acid sequence of SEQ ID NO:1494. In one aspect, provided herein is an antibody that binds TRGV9, comprising a heavy chain having an amino acid sequence having at least 95% identity to an amino acid sequence of SEQ ID NO:1495. In one aspect, provided herein is an antibody that binds TRGV9, comprising a light chain having an amino acid sequence having at least 95% identity to an amino acid sequence of SEQ ID NO:1496. In one aspect, provided herein is an antibody that binds TRGV9, comprising a heavy chain having an amino acid sequence having at least 95% identity to an amino acid sequence of SEQ ID NO:1495, and a light chain having an amino acid sequence having at least 95% identity to an amino acid sequence of SEQ ID NO:1496.

[0143] In one aspect, provided herein is an antibody that binds TRGV9, comprising: (i) a VH comprising a VH CDR1, a VH CDR2, and a VH CDR3 having an amino acid sequence of SEQ ID NOs:1497, 1498, and 1499, respectively, and (ii) a VL comprising a VL CDR1, VL CDR2, and VL CDR3 having an amino acid sequence of SEQ ID NOs:1500, 1501, and 1502, respectively. In one aspect, provided herein is an antibody that binds TRGV9, comprising: (i) a VH comprising a VH CDR1, a VH CDR2, and a VH CDR3 having an amino acid sequence of SEQ ID NOs:1503, 1504, and 1505, respectively, and (ii) a VL comprising a VL CDR1, VL CDR2, and VL CDR3 having an amino acid sequence of SEQ ID NOs:1506, 1507, and 1508, respectively. In one aspect, provided herein is an antibody that binds TRGV9, comprising: (i) a VH comprising a VH CDR1, a VH CDR2, and a VH CDR3 having an amino acid sequence of SEQ ID NOs:1509, 1510, and 1511, respectively, and (ii) a VL comprising a VL CDR1, VL CDR2, and VL CDR3 having an amino acid sequence of SEQ ID NOs:1512, 1513, and 1514, respectively. In one aspect, provided herein is an antibody that binds TRGV9, comprising: (i) a VH comprising a VH CDR1, a VH CDR2, and a VH CDR3 having an amino acid sequence of SEQ ID NOs:1515, 1516, and 1517, respectively, and (ii) a VL comprising a VL CDR1, VL CDR2, and VL CDR3 having an amino acid sequence of SEQ ID NOs:1518, 1519, and 1520, respectively. In one aspect, provided herein is an antibody that binds TRGV9, comprising: (i) a VH comprising a VH CDR1, a VH CDR2, and a VH CDR3 having an amino acid sequence of SEQ ID NOs:1521, 1522, and 1523, respectively, and (ii) a VL comprising a VL CDR1, VL CDR2, and VL CDR3 having an amino acid sequence of SEQ ID NOs:1524, 1525, and 1526, respectively. In one aspect, provided herein is an antibody that binds TRGV9, comprising: (i) a VH comprising a VH CDR1, a VH CDR2, and a VH CDR3 having an amino acid sequence of a VH CDR1, a VH CDR2, and a VH CDR3, respectively, of a VH having an amino acid sequence of SEQ ID NO:1527; and (ii) a VL comprising a VL CDR1, a VL CDR2, and a VL CDR3 having an amino acid sequence of a VL CDR1, a VL CDR2, and a VL CDR3, respectively, of SEQ ID NO:1528. In one aspect, provided herein is an antibody that binds TRGV9, comprising a VH having an amino acid sequence of SEQ ID NO:1527. In one aspect, provided herein is an antibody that binds TRGV9, comprising a VL having an amino acid sequence of SEQ ID NO:1528. In one aspect, provided herein is an antibody that binds TRGV9, comprising a VH having an amino acid sequence of SEQ ID NO:1527, and a VL having an amino acid sequence of SEQ ID NO:1528. In one aspect, provided herein is an antibody that binds TRGV9, comprising a heavy chain having an amino acid sequence of SEQ ID NO:1529. In one aspect, provided herein is an antibody that binds TRGV9, comprising a light chain having an amino acid sequence of SEQ ID NO:1530. In one aspect, provided herein is an antibody that binds TRGV9, comprising a heavy chain having an amino acid sequence of SEQ ID NO:1529, and a light chain having an amino acid sequence of SEQ ID NO:1530. In one aspect, provided herein is an antibody that binds TRGV9, comprising a VH having an amino acid sequence having at least 95% identity to an amino acid sequence of SEQ ID NO:1527. In one aspect, provided herein is an antibody that binds TRGV9, comprising a VL having an amino acid sequence having at least 95% identity to an amino acid sequence of SEQ ID NO:1528. In one aspect, provided herein is an antibody that binds TRGV9, comprising a VH having an amino acid sequence having at least 95% identity to an amino acid sequence of SEQ ID NO:1527, and a VL having an amino acid sequence having at least 95% identity to an amino acid sequence of SEQ ID NO:1528. In one aspect, provided herein is an antibody that binds TRGV9, comprising a heavy chain having an amino acid sequence having at least 95% identity to an amino acid sequence of SEQ ID NO:1529. In one aspect, provided herein is an antibody that binds TRGV9, comprising a light chain having an amino acid sequence having at least 95% identity to an amino acid sequence of SEQ ID NO:1530. In one aspect, provided herein is an antibody that binds TRGV9, comprising a heavy chain having an amino acid sequence having at least 95% identity to an amino acid sequence of SEQ ID NO:1529, and a light chain having an amino acid sequence having at least 95% identity to an amino acid sequence of SEQ ID NO:1530.

[0144] In one aspect, provided herein is an antibody that binds TRGV9, comprising: (i) a VH comprising a VH CDR1, a VH CDR2, and a VH CDR3 having an amino acid sequence of SEQ ID NOs:1531, 1532, and 1533, respectively, and (ii) a VL comprising a VL CDR1, VL CDR2, and VL CDR3 having an amino acid sequence of SEQ ID NOs:1534, 1535, and 1536, respectively. In one aspect, provided herein is an antibody that binds TRGV9, comprising: (i) a VH comprising a VH CDR1, a VH CDR2, and a VH CDR3 having an amino acid sequence of SEQ ID NOs:1537, 1538, and 1539, respectively, and (ii) a VL comprising a VL CDR1, VL CDR2, and VL CDR3 having an amino acid sequence of SEQ ID NOs:1540, 1541, and 1542, respectively. In one aspect, provided herein is an antibody that binds TRGV9, comprising: (i) a VH comprising a VH CDR1, a VH CDR2, and a VH CDR3 having an amino acid sequence of SEQ ID NOs:1543, 1544, and 1545, respectively, and (ii) a VL comprising a VL CDR1, VL CDR2, and VL CDR3 having an amino acid sequence of SEQ ID NOs:1546, 1547, and 1548, respectively. In one aspect, provided herein is an antibody that binds TRGV9, comprising: (i) a VH comprising a VH CDR1, a VH CDR2, and a VH CDR3 having an amino acid sequence of SEQ ID NOs:1549, 1550, and 1551, respectively, and (ii) a VL comprising a VL CDR1, VL CDR2, and VL CDR3 having an amino acid sequence of SEQ ID NOs:1552, 1553, and 1554, respectively. In one aspect, provided herein is an antibody that binds TRGV9, comprising: (i) a VH comprising a VH CDR1, a VH CDR2, and a VH CDR3 having an amino acid sequence of SEQ ID NOs:1555, 1556, and 1557, respectively, and (ii) a VL comprising a VL CDR1, VL CDR2, and VL CDR3 having an amino acid sequence of SEQ ID NOs:1558, 1559, and 1560, respectively. In one aspect, provided herein is an antibody that binds TRGV9, comprising: (i) a VH comprising a VH CDR1, a VH CDR2, and a VH CDR3 having an amino acid sequence of a VH CDR1, a VH CDR2, and a VH CDR3, respectively, of a VH having an amino acid sequence of SEQ ID NO:1561; and (ii) a VL comprising a VL CDR1, a VL CDR2, and a VL CDR3 having an amino acid sequence of a VL CDR1, a VL CDR2, and a VL CDR3, respectively, of SEQ ID NO:1562. In one aspect, provided herein is an antibody that binds TRGV9, comprising a VH having an amino acid sequence of SEQ ID NO:1561. In one aspect, provided herein is an antibody that binds TRGV9, comprising a VL having an amino acid sequence of SEQ ID NO:1562. In one aspect, provided herein is an antibody that binds TRGV9, comprising a VH having an amino acid sequence of SEQ ID NO:1561, and a VL having an amino acid sequence of SEQ ID NO:1562. In one aspect, provided herein is an antibody that binds TRGV9, comprising a heavy chain having an amino acid sequence of SEQ ID NO:1563. In one aspect, provided herein is an antibody that binds TRGV9, comprising a light chain having an amino acid sequence of SEQ ID NO:1564. In one aspect, provided herein is an antibody that binds TRGV9, comprising a heavy chain having an amino acid sequence of SEQ ID NO:1563, and a light chain having an amino acid sequence of SEQ ID NO:1564. In one aspect, provided herein is an antibody that binds TRGV9, comprising a VH having an amino acid sequence having at least 95% identity to an amino acid sequence of SEQ ID NO:1561. In one aspect, provided herein is an antibody that binds TRGV9, comprising a VL having an amino acid sequence having at least 95% identity to an amino acid sequence of SEQ ID NO:1562. In one aspect, provided herein is an antibody that binds TRGV9, comprising a VH having an amino acid sequence having at least 95% identity to an amino acid sequence of SEQ ID NO:1561, and a VL having an amino acid sequence having at least 95% identity to an amino acid sequence of SEQ ID NO:1562. In one aspect, provided herein is an antibody that binds TRGV9, comprising a heavy chain having an amino acid sequence having at least 95% identity to an amino acid sequence of SEQ ID NO:1563. In one aspect, provided herein is an antibody that binds TRGV9, comprising a light chain having an amino acid sequence having at least 95% identity to an amino acid sequence of SEQ ID NO:1564. In one aspect, provided herein is an antibody that binds TRGV9, comprising a heavy chain having an amino acid sequence having at least 95% identity to an amino acid sequence of SEQ ID NO:1563, and a light chain having an amino acid sequence having at least 95% identity to an amino acid sequence of SEQ ID NO:1564.

[0145] In one aspect, provided herein is an antibody that binds TRGV9, comprising: (i) a VH comprising a VH CDR1, a VH CDR2, and a VH CDR3 having an amino acid sequence of SEQ ID NOs:1565, 1566, and 1567, respectively, and (ii) a VL comprising a VL CDR1, VL CDR2, and VL CDR3 having an amino acid sequence of SEQ ID NOs:1568, 1569, and 1570, respectively. In one aspect, provided herein is an antibody that binds TRGV9, comprising: (i) a VH comprising a VH CDR1, a VH CDR2, and a VH CDR3 having an amino acid sequence of SEQ ID NOs:1571, 1572, and 1573, respectively, and (ii) a VL comprising a VL CDR1, VL CDR2, and VL CDR3 having an amino acid sequence of SEQ ID NOs:1574, 1575, and 1576, respectively. In one aspect, provided herein is an antibody that binds TRGV9, comprising: (i) a VH comprising a VH CDR1, a VH CDR2, and a VH CDR3 having an amino acid sequence of SEQ ID NOs:1577, 1578, and 1579, respectively, and (ii) a VL comprising a VL CDR1, VL CDR2, and VL CDR3 having an amino acid sequence of SEQ ID NOs:1580, 1581, and 1582, respectively. In one aspect, provided herein is an antibody that binds TRGV9, comprising: (i) a VH comprising a VH CDR1, a VH CDR2, and a VH CDR3 having an amino acid sequence of SEQ ID NOs:1583, 1584, and 1585, respectively, and (ii) a VL comprising a VL CDR1, VL CDR2, and VL CDR3 having an amino acid sequence of SEQ ID NOs:1586, 1587, and 1588, respectively. In one aspect, provided herein is an antibody that binds TRGV9, comprising: (i) a VH comprising a VH CDR1, a VH CDR2, and a VH CDR3 having an amino acid sequence of SEQ ID NOs:1589, 1590, and 1591, respectively, and (ii) a VL comprising a VL CDR1, VL CDR2, and VL CDR3 having an amino acid sequence of SEQ ID NOs:1592, 1593, and 1594, respectively. In one aspect, provided herein is an antibody that binds TRGV9, comprising: (i) a VH comprising a VH CDR1, a VH CDR2, and a VH CDR3 having an amino acid sequence of a VH CDR1, a VH CDR2, and a VH CDR3, respectively, of a VH having an amino acid sequence of SEQ ID NO:1595; and (ii) a VL comprising a VL CDR1, a VL CDR2, and a VL CDR3 having an amino acid sequence of a VL CDR1, a VL CDR2, and a VL CDR3, respectively, of SEQ ID NO:1596. In one aspect, provided herein is an antibody that binds TRGV9, comprising a VH having an amino acid sequence of SEQ ID NO:1595. In one aspect, provided herein is an antibody that binds TRGV9, comprising a VL having an amino acid sequence of SEQ ID NO:1596. In one aspect, provided herein is an antibody that binds TRGV9, comprising a VH having an amino acid sequence of SEQ ID NO:1595, and a VL having an amino acid sequence of SEQ ID NO:1596. In one aspect, provided herein is an antibody that binds TRGV9, comprising a heavy chain having an amino acid sequence of SEQ ID NO:1597. In one aspect, provided herein is an antibody that binds TRGV9, comprising a light chain having an amino acid sequence of SEQ ID NO:1598. In one aspect, provided herein is an antibody that binds TRGV9, comprising a heavy chain having an amino acid sequence of SEQ ID NO:1597, and a light chain having an amino acid sequence of SEQ ID NO:1598. In one aspect, provided herein is an antibody that binds TRGV9, comprising a VH having an amino acid sequence having at least 95% identity to an amino acid sequence of SEQ ID NO:1595. In one aspect, provided herein is an antibody that binds TRGV9, comprising a VL having an amino acid sequence having at least 95% identity to an amino acid sequence of SEQ ID NO:1596. In one aspect, provided herein is an antibody that binds TRGV9, comprising a VH having an amino acid sequence having at least 95% identity to an amino acid sequence of SEQ ID NO:1595, and a VL having an amino acid sequence having at least 95% identity to an amino acid sequence of SEQ ID NO:1596. In one aspect, provided herein is an antibody that binds TRGV9, comprising a heavy chain having an amino acid sequence having at least 95% identity to an amino acid sequence of SEQ ID NO:1597. In one aspect, provided herein is an antibody that binds TRGV9, comprising a light chain having an amino acid sequence having at least 95% identity to an amino acid sequence of SEQ ID NO:1598. In one aspect, provided herein is an antibody that binds TRGV9, comprising a heavy chain having an amino acid sequence having at least 95% identity to an amino acid sequence of SEQ ID NO:1597, and a light chain having an amino acid sequence having at least 95% identity to an amino acid sequence of SEQ ID NO:1598.

[0146] In one aspect, provided herein is an antibody that binds TRGV9, comprising: (i) a VH comprising a VH CDR1, a VH CDR2, and a VH CDR3 having an amino acid sequence of SEQ ID NOs:1599, 1600, and 1601, respectively, and (ii) a VL comprising a VL CDR1, VL CDR2, and VL CDR3 having an amino acid sequence of SEQ ID NOs:1602, 1603, and 1604, respectively. In one aspect, provided herein is an antibody that binds TRGV9, comprising: (i) a VH comprising a VH CDR1, a VH CDR2, and a VH CDR3 having an amino acid sequence of SEQ ID NOs:1605, 1606, and 1607, respectively, and (ii) a VL comprising a VL CDR1, VL CDR2, and VL CDR3 having an amino acid sequence of SEQ ID NOs:1608, 1609, and 1610, respectively. In one aspect, provided herein is an antibody that binds TRGV9, comprising: (i) a VH comprising a VH CDR1, a VH CDR2, and a VH CDR3 having an amino acid sequence of SEQ ID NOs:1611, 1612, and 1613, respectively, and (ii) a VL comprising a VL CDR1, VL CDR2, and VL CDR3 having an amino acid sequence of SEQ ID NOs:1614, 1615, and 1616, respectively. In one aspect, provided herein is an antibody that binds TRGV9, comprising: (i) a VH comprising a VH CDR1, a VH CDR2, and a VH CDR3 having an amino acid sequence of SEQ ID NOs:1617, 1618, and 1619, respectively, and (ii) a VL comprising a VL CDR1, VL CDR2, and VL CDR3 having an amino acid sequence of SEQ ID NOs:1620, 1621, and 1622, respectively. In one aspect, provided herein is an antibody that binds TRGV9, comprising: (i) a VH comprising a VH CDR1, a VH CDR2, and a VH CDR3 having an amino acid sequence of SEQ ID NOs:1623, 1624, and 1625, respectively, and (ii) a VL comprising a VL CDR1, VL CDR2, and VL CDR3 having an amino acid sequence of SEQ ID NOs:1626, 1627, and 1628, respectively. In one aspect, provided herein is an antibody that binds TRGV9, comprising: (i) a VH comprising a VH CDR1, a VH CDR2, and a VH CDR3 having an amino acid sequence of a VH CDR1, a VH CDR2, and a VH CDR3, respectively, of a VH having an amino acid sequence of SEQ ID NO:1629; and (ii) a VL comprising a VL CDR1, a VL CDR2, and a VL CDR3 having an amino acid sequence of a VL CDR1, a VL CDR2, and a VL CDR3, respectively, of SEQ ID NO:1630. In one aspect, provided herein is an antibody that binds TRGV9, comprising a VH having an amino acid sequence of SEQ ID NO:1629. In one aspect, provided herein is an antibody that binds TRGV9, comprising a VL having an amino acid sequence of SEQ ID NO:1630. In one aspect, provided herein is an antibody that binds TRGV9, comprising a VH having an amino acid sequence of SEQ ID NO:1629, and a VL having an amino acid sequence of SEQ ID NO:1630. In one aspect, provided herein is an antibody that binds TRGV9, comprising a heavy chain having an amino acid sequence of SEQ ID NO:1631. In one aspect, provided herein is an antibody that binds TRGV9, comprising a light chain having an amino acid sequence of SEQ ID NO:1632. In one aspect, provided herein is an antibody that binds TRGV9, comprising a heavy chain having an amino acid sequence of SEQ ID NO:1631, and a light chain having an amino acid sequence of SEQ ID NO:1632. In one aspect, provided herein is an antibody that binds TRGV9, comprising a VH having an amino acid sequence having at least 95% identity to an amino acid sequence of SEQ ID NO:1629. In one aspect, provided herein is an antibody that binds TRGV9, comprising a VL having an amino acid sequence having at least 95% identity to an amino acid sequence of SEQ ID NO:1630. In one aspect, provided herein is an antibody that binds TRGV9, comprising a VH having an amino acid sequence having at least 95% identity to an amino acid sequence of SEQ ID NO:1629, and a VL having an amino acid sequence having at least 95% identity to an amino acid sequence of SEQ ID NO:1630. In one aspect, provided herein is an antibody that binds TRGV9, comprising a heavy chain having an amino acid sequence having at least 95% identity to an amino acid sequence of SEQ ID NO:1631. In one aspect, provided herein is an antibody that binds TRGV9, comprising a light chain having an amino acid sequence having at least 95% identity to an amino acid sequence of SEQ ID NO:1632. In one aspect, provided herein is an antibody that binds TRGV9, comprising a heavy chain having an amino acid sequence having at least 95% identity to an amino acid sequence of SEQ ID NO:1631, and a light chain having an amino acid sequence having at least 95% identity to an amino acid sequence of SEQ ID NO:1632.

[0147] In one aspect, provided herein is an antibody that binds TRGV9, comprising: (i) a VH comprising a VH CDR1, a VH CDR2, and a VH CDR3 having an amino acid sequence of SEQ ID NOs:1633, 1634, and 1635, respectively, and (ii) a VL comprising a VL CDR1, VL CDR2, and VL CDR3 having an amino acid sequence of SEQ ID NOs:1636, 1637, and 1638, respectively. In one aspect, provided herein is an antibody that binds TRGV9, comprising: (i) a VH comprising a VH CDR1, a VH CDR2, and a VH CDR3 having an amino acid sequence of SEQ ID NOs:1639, 1640, and 1641, respectively, and (ii) a VL comprising a VL CDR1, VL CDR2, and VL CDR3 having an amino acid sequence of SEQ ID NOs:1642, 1643, and 1644, respectively. In one aspect, provided herein is an antibody that binds TRGV9, comprising: (i) a VH comprising a VH CDR1, a VH CDR2, and a VH CDR3 having an amino acid sequence of SEQ ID NOs:1645, 1646, and 1647, respectively, and (ii) a VL comprising a VL CDR1, VL CDR2, and VL CDR3 having an amino acid sequence of SEQ ID NOs:1648, 1649, and 1650, respectively. In one aspect, provided herein is an antibody that binds TRGV9, comprising: (i) a VH comprising a VH CDR1, a VH CDR2, and a VH CDR3 having an amino acid sequence of SEQ ID NOs:1651, 1652, and 1653, respectively, and (ii) a VL comprising a VL CDR1, VL CDR2, and VL CDR3 having an amino acid sequence of SEQ ID NOs:1654, 1655, and 1656, respectively. In one aspect, provided herein is an antibody that binds TRGV9, comprising: (i) a VH comprising a VH CDR1, a VH CDR2, and a VH CDR3 having an amino acid sequence of SEQ ID NOs:1657, 1658, and 1659, respectively, and (ii) a VL comprising a VL CDR1, VL CDR2, and VL CDR3 having an amino acid sequence of SEQ ID NOs:1660, 1661, and 1662, respectively. In one aspect, provided herein is an antibody that binds TRGV9, comprising: (i) a VH comprising a VH CDR1, a VH CDR2, and a VH CDR3 having an amino acid sequence of a VH CDR1, a VH CDR2, and a VH CDR3, respectively, of a VH having an amino acid sequence of SEQ ID NO:1663; and (ii) a VL comprising a VL CDR1, a VL CDR2, and a VL CDR3 having an amino acid sequence of a VL CDR1, a VL CDR2, and a VL CDR3, respectively, of SEQ ID NO:1664. In one aspect, provided herein is an antibody that binds TRGV9, comprising a VH having an amino acid sequence of SEQ ID NO:1663. In one aspect, provided herein is an antibody that binds TRGV9, comprising a VL having an amino acid sequence of SEQ ID NO:1664. In one aspect, provided herein is an antibody that binds TRGV9, comprising a VH having an amino acid sequence of SEQ ID NO:1663, and a VL having an amino acid sequence of SEQ ID NO:1664. In one aspect, provided herein is an antibody that binds TRGV9, comprising a heavy chain having an amino acid sequence of SEQ ID NO:1665. In one aspect, provided herein is an antibody that binds TRGV9, comprising a light chain having an amino acid sequence of SEQ ID NO:1666. In one aspect, provided herein is an antibody that binds TRGV9, comprising a heavy chain having an amino acid sequence of SEQ ID NO:1665, and a light chain having an amino acid sequence of SEQ ID NO:1666. In one aspect, provided herein is an antibody that binds TRGV9, comprising a VH having an amino acid sequence having at least 95% identity to an amino acid sequence of SEQ ID NO:1663. In one aspect, provided herein is an antibody that binds TRGV9, comprising a VL having an amino acid sequence having at least 95% identity to an amino acid sequence of SEQ ID NO:1664. In one aspect, provided herein is an antibody that binds TRGV9, comprising a VH having an amino acid sequence having at least 95% identity to an amino acid sequence of SEQ ID NO:1663, and a VL having an amino acid sequence having at least 95% identity to an amino acid sequence of SEQ ID NO:1664. In one aspect, provided herein is an antibody that binds TRGV9, comprising a heavy chain having an amino acid sequence having at least 95% identity to an amino acid sequence of SEQ ID NO:1665. In one aspect, provided herein is an antibody that binds TRGV9, comprising a light chain having an amino acid sequence having at least 95% identity to an amino acid sequence of SEQ ID NO:1666. In one aspect, provided herein is an antibody that binds TRGV9, comprising a heavy chain having an amino acid sequence having at least 95% identity to an amino acid sequence of SEQ ID NO:1665, and a light chain having an amino acid sequence having at least 95% identity to an amino acid sequence of SEQ ID NO:1666.

[0148] In one aspect, provided herein is an antibody that binds TRGV9, comprising: (i) a VH comprising a VH CDR1, a VH CDR2, and a VH CDR3 having an amino acid sequence of SEQ ID NOs:1667, 1668, and 1669, respectively, and (ii) a VL comprising a VL CDR1, VL CDR2, and VL CDR3 having an amino acid sequence of SEQ ID NOs:1670, 1671, and 1672, respectively. In one aspect, provided herein is an antibody that binds TRGV9, comprising: (i) a VH comprising a VH CDR1, a VH CDR2, and a VH CDR3 having an amino acid sequence of SEQ ID NOs:1673, 1674, and 1675, respectively, and (ii) a VL comprising a VL CDR1, VL CDR2, and VL CDR3 having an amino acid sequence of SEQ ID NOs:1676, 1677, and 1678, respectively. In one aspect, provided herein is an antibody that binds TRGV9, comprising: (i) a VH comprising a VH CDR1, a VH CDR2, and a VH CDR3 having an amino acid sequence of SEQ ID NOs:1679, 1680, and 1681, respectively, and (ii) a VL comprising a VL CDR1, VL CDR2, and VL CDR3 having an amino acid sequence of SEQ ID NOs:1682, 1683, and 1684, respectively. In one aspect, provided herein is an antibody that binds TRGV9, comprising: (i) a VH comprising a VH CDR1, a VH CDR2, and a VH CDR3 having an amino acid sequence of SEQ ID NOs:1685, 1686, and 1687, respectively, and (ii) a VL comprising a VL CDR1, VL CDR2, and VL CDR3 having an amino acid sequence of SEQ ID NOs:1688, 1689, and 1690, respectively. In one aspect, provided herein is an antibody that binds TRGV9, comprising: (i) a VH comprising a VH CDR1, a VH CDR2, and a VH CDR3 having an amino acid sequence of SEQ ID NOs:1691, 1692, and 1693, respectively, and (ii) a VL comprising a VL CDR1, VL CDR2, and VL CDR3 having an amino acid sequence of SEQ ID NOs:1694, 1695, and 1696, respectively. In one aspect, provided herein is an antibody that binds TRGV9, comprising: (i) a VH comprising a VH CDR1, a VH CDR2, and a VH CDR3 having an amino acid sequence of a VH CDR1, a VH CDR2, and a VH CDR3, respectively, of a VH having an amino acid sequence of SEQ ID NO:1697; and (ii) a VL comprising a VL CDR1, a VL CDR2, and a VL CDR3 having an amino acid sequence of a VL CDR1, a VL CDR2, and a VL CDR3, respectively, of SEQ ID NO:1698. In one aspect, provided herein is an antibody that binds TRGV9, comprising a VH having an amino acid sequence of SEQ ID NO:1697. In one aspect, provided herein is an antibody that binds TRGV9, comprising a VL having an amino acid sequence of SEQ ID NO:1698. In one aspect, provided herein is an antibody that binds TRGV9, comprising a VH having an amino acid sequence of SEQ ID NO:1697, and a VL having an amino acid sequence of SEQ ID NO:1698. In one aspect, provided herein is an antibody that binds TRGV9, comprising a heavy chain having an amino acid sequence of SEQ ID NO:1699. In one aspect, provided herein is an antibody that binds TRGV9, comprising a light chain having an amino acid sequence of SEQ ID NO:1700. In one aspect, provided herein is an antibody that binds TRGV9, comprising a heavy chain having an amino acid sequence of SEQ ID NO:1699, and a light chain having an amino acid sequence of SEQ ID NO:1700. In one aspect, provided herein is an antibody that binds TRGV9, comprising a VH having an amino acid sequence having at least 95% identity to an amino acid sequence of SEQ ID NO:1697. In one aspect, provided herein is an antibody that binds TRGV9, comprising a VL having an amino acid sequence having at least 95% identity to an amino acid sequence of SEQ ID NO:1698. In one aspect, provided herein is an antibody that binds TRGV9, comprising a VH having an amino acid sequence having at least 95% identity to an amino acid sequence of SEQ ID NO:1697, and a VL having an amino acid sequence having at least 95% identity to an amino acid sequence of SEQ ID NO:1698. In one aspect, provided herein is an antibody that binds TRGV9, comprising a heavy chain having an amino acid sequence having at least 95% identity to an amino acid sequence of SEQ ID NO:1699. In one aspect, provided herein is an antibody that binds TRGV9, comprising a light chain having an amino acid sequence having at least 95% identity to an amino acid sequence of SEQ ID NO:1700. In one aspect, provided herein is an antibody that binds TRGV9, comprising a heavy chain having an amino acid sequence having at least 95% identity to an amino acid sequence of SEQ ID NO:1699, and a light chain having an amino acid sequence having at least 95% identity to an amino acid sequence of SEQ ID NO:1700.

[0149] In one aspect, provided herein is an antibody that binds TRGV9, comprising: (i) a VH comprising a VH CDR1, a VH CDR2, and a VH CDR3 having an amino acid sequence of SEQ ID NOs:1701, 1702, and 1703, respectively, and (ii) a VL comprising a VL CDR1, VL CDR2, and VL CDR3 having an amino acid sequence of SEQ ID NOs:1704, 1705, and 1706, respectively. In one aspect, provided herein is an antibody that binds TRGV9, comprising: (i) a VH comprising a VH CDR1, a VH CDR2, and a VH CDR3 having an amino acid sequence of SEQ ID NOs:1707, 1708, and 1709, respectively, and (ii) a VL comprising a VL CDR1, VL CDR2, and VL CDR3 having an amino acid sequence of SEQ ID NOs:1710, 1711, and 1712, respectively. In one aspect, provided herein is an antibody that binds TRGV9, comprising: (i) a VH comprising a VH CDR1, a VH CDR2, and a VH CDR3 having an amino acid sequence of SEQ ID NOs:1713, 1714, and 1715, respectively, and (ii) a VL comprising a VL CDR1, VL CDR2, and VL CDR3 having an amino acid sequence of SEQ ID NOs:1716, 1717, and 1718, respectively. In one aspect, provided herein is an antibody that binds TRGV9, comprising: (i) a VH comprising a VH CDR1, a VH CDR2, and a VH CDR3 having an amino acid sequence of SEQ ID NOs:1719, 1720, and 1721, respectively, and (ii) a VL comprising a VL CDR1, VL CDR2, and VL CDR3 having an amino acid sequence of SEQ ID NOs:1722, 1723, and 1724, respectively. In one aspect, provided herein is an antibody that binds TRGV9, comprising: (i) a VH comprising a VH CDR1, a VH CDR2, and a VH CDR3 having an amino acid sequence of SEQ ID NOs:1725, 1726, and 1727, respectively, and (ii) a VL comprising a VL CDR1, VL CDR2, and VL CDR3 having an amino acid sequence of SEQ ID NOs:1728, 1729, and 1730, respectively. In one aspect, provided herein is an antibody that binds TRGV9, comprising: (i) a VH comprising a VH CDR1, a VH CDR2, and a VH CDR3 having an amino acid sequence of a VH CDR1, a VH CDR2, and a VH CDR3, respectively, of a VH having an amino acid sequence of SEQ ID NO:1731; and (ii) a VL comprising a VL CDR1, a VL CDR2, and a VL CDR3 having an amino acid sequence of a VL CDR1, a VL CDR2, and a VL CDR3, respectively, of SEQ ID NO:1732. In one aspect, provided herein is an antibody that binds TRGV9, comprising a VH having an amino acid sequence of SEQ ID NO:1731. In one aspect, provided herein is an antibody that binds TRGV9, comprising a VL having an amino acid sequence of SEQ ID NO:1732. In one aspect, provided herein is an antibody that binds TRGV9, comprising a VH having an amino acid sequence of SEQ ID NO:1731, and a VL having an amino acid sequence of SEQ ID NO:1732. In one aspect, provided herein is an antibody that binds TRGV9, comprising a heavy chain having an amino acid sequence of SEQ ID NO:1733. In one aspect, provided herein is an antibody that binds TRGV9, comprising a light chain having an amino acid sequence of SEQ ID NO:1734. In one aspect, provided herein is an antibody that binds TRGV9, comprising a heavy chain having an amino acid sequence of SEQ ID NO:1733, and a light chain having an amino acid sequence of SEQ ID NO:1734. In one aspect, provided herein is an antibody that binds TRGV9, comprising a VH having an amino acid sequence having at least 95% identity to an amino acid sequence of SEQ ID NO:1731. In one aspect, provided herein is an antibody that binds TRGV9, comprising a VL having an amino acid sequence having at least 95% identity to an amino acid sequence of SEQ ID NO:1732. In one aspect, provided herein is an antibody that binds TRGV9, comprising a VH having an amino acid sequence having at least 95% identity to an amino acid sequence of SEQ ID NO:1731, and a VL having an amino acid sequence having at least 95% identity to an amino acid sequence of SEQ ID NO:1732. In one aspect, provided herein is an antibody that binds TRGV9, comprising a heavy chain having an amino acid sequence having at least 95% identity to an amino acid sequence of SEQ ID NO:1733. In one aspect, provided herein is an antibody that binds TRGV9, comprising a light chain having an amino acid sequence having at least 95% identity to an amino acid sequence of SEQ ID NO:1734. In one aspect, provided herein is an antibody that binds TRGV9, comprising a heavy chain having an amino acid sequence having at least 95% identity to an amino acid sequence of SEQ ID NO:1733, and a light chain having an amino acid sequence having at least 95% identity to an amino acid sequence of SEQ ID NO:1734.

[0150] In one aspect, provided herein is an antibody that binds TRGV9, comprising: (i) a VH comprising a VH CDR1, a VH CDR2, and a VH CDR3 having an amino acid sequence of SEQ ID NOs:1735, 1736, and 1737, respectively, and (ii) a VL comprising a VL CDR1, VL CDR2, and VL CDR3 having an amino acid sequence of SEQ ID NOs:1738, 1739, and 1740, respectively. In one aspect, provided herein is an antibody that binds TRGV9, comprising: (i) a VH comprising a VH CDR1, a VH CDR2, and a VH CDR3 having an amino acid sequence of SEQ ID NOs:1741, 1742, and 1743, respectively, and (ii) a VL comprising a VL CDR1, VL CDR2, and VL CDR3 having an amino acid sequence of SEQ ID NOs:1744, 1745, and 1746, respectively. In one aspect, provided herein is an antibody that binds TRGV9, comprising: (i) a VH comprising a VH CDR1, a VH CDR2, and a VH CDR3 having an amino acid sequence of SEQ ID NOs:1747, 1748, and 1749, respectively, and (ii) a VL comprising a VL CDR1, VL CDR2, and VL CDR3 having an amino acid sequence of SEQ ID NOs:1750, 1751, and 1752, respectively. In one aspect, provided herein is an antibody that binds TRGV9, comprising: (i) a VH comprising a VH CDR1, a VH CDR2, and a VH CDR3 having an amino acid sequence of SEQ ID NOs:1753, 1754, and 1755, respectively, and (ii) a VL comprising a VL CDR1, VL CDR2, and VL CDR3 having an amino acid sequence of SEQ ID NOs:1756, 1757, and 1758, respectively. In one aspect, provided herein is an antibody that binds TRGV9, comprising: (i) a VH comprising a VH CDR1, a VH CDR2, and a VH CDR3 having an amino acid sequence of SEQ ID NOs:1759, 1760, and 1761, respectively, and (ii) a VL comprising a VL CDR1, VL CDR2, and VL CDR3 having an amino acid sequence of SEQ ID NOs:1762, 1763, and 1764, respectively. In one aspect, provided herein is an antibody that binds TRGV9, comprising: (i) a VH comprising a VH CDR1, a VH CDR2, and a VH CDR3 having an amino acid sequence of a VH CDR1, a VH CDR2, and a VH CDR3, respectively, of a VH having an amino acid sequence of SEQ ID NO:1765; and (ii) a VL comprising a VL CDR1, a VL CDR2, and a VL CDR3 having an amino acid sequence of a VL CDR1, a VL CDR2, and a VL CDR3, respectively, of SEQ ID NO:1766. In one aspect, provided herein is an antibody that binds TRGV9, comprising a VH having an amino acid sequence of SEQ ID NO:1765. In one aspect, provided herein is an antibody that binds TRGV9, comprising a VL having an amino acid sequence of SEQ ID NO:1766. In one aspect, provided herein is an antibody that binds TRGV9, comprising a VH having an amino acid sequence of SEQ ID NO:1765, and a VL having an amino acid sequence of SEQ ID NO:1766. In one aspect, provided herein is an antibody that binds TRGV9, comprising a heavy chain having an amino acid sequence of SEQ ID NO:1767. In one aspect, provided herein is an antibody that binds TRGV9, comprising a light chain having an amino acid sequence of SEQ ID NO:1768. In one aspect, provided herein is an antibody that binds TRGV9, comprising a heavy chain having an amino acid sequence of SEQ ID NO:1767, and a light chain having an amino acid sequence of SEQ ID NO:1768. In one aspect, provided herein is an antibody that binds TRGV9, comprising a VH having an amino acid sequence having at least 95% identity to an amino acid sequence of SEQ ID NO:1765. In one aspect, provided herein is an antibody that binds TRGV9, comprising a VL having an amino acid sequence having at least 95% identity to an amino acid sequence of SEQ ID NO:1766. In one aspect, provided herein is an antibody that binds TRGV9, comprising a VH having an amino acid sequence having at least 95% identity to an amino acid sequence of SEQ ID NO:1765, and a VL having an amino acid sequence having at least 95% identity to an amino acid sequence of SEQ ID NO:1766. In one aspect, provided herein is an antibody that binds TRGV9, comprising a heavy chain having an amino acid sequence having at least 95% identity to an amino acid sequence of SEQ ID NO:1767. In one aspect, provided herein is an antibody that binds TRGV9, comprising a light chain having an amino acid sequence having at least 95% identity to an amino acid sequence of SEQ ID NO:1768. In one aspect, provided herein is an antibody that binds TRGV9, comprising a heavy chain having an amino acid sequence having at least 95% identity to an amino acid sequence of SEQ ID NO:1767, and a light chain having an amino acid sequence having at least 95% identity to an amino acid sequence of SEQ ID NO:1768.

[0151] In one aspect, provided herein is an antibody that binds TRGV9, comprising: (i) a VH comprising a VH CDR1, a VH CDR2, and a VH CDR3 having an amino acid sequence of SEQ ID NOs:1769, 1770, and 1771, respectively, and (ii) a VL comprising a VL CDR1, VL CDR2, and VL CDR3 having an amino acid sequence of SEQ ID NOs:1772, 1773, and 1774, respectively. In one aspect, provided herein is an antibody that binds TRGV9, comprising: (i) a VH comprising a VH CDR1, a VH CDR2, and a VH CDR3 having an amino acid sequence of SEQ ID NOs:1775, 1776, and 1777, respectively, and (ii) a VL comprising a VL CDR1, VL CDR2, and VL CDR3 having an amino acid sequence of SEQ ID NOs:1778, 1779, and 1780, respectively. In one aspect, provided herein is an antibody that binds TRGV9, comprising: (i) a VH comprising a VH CDR1, a VH CDR2, and a VH CDR3 having an amino acid sequence of SEQ ID NOs:1781, 1782, and 1783, respectively, and (ii) a VL comprising a VL CDR1, VL CDR2, and VL CDR3 having an amino acid sequence of SEQ ID NOs:1784, 1785, and 1786, respectively. In one aspect, provided herein is an antibody that binds TRGV9, comprising: (i) a VH comprising a VH CDR1, a VH CDR2, and a VH CDR3 having an amino acid sequence of SEQ ID NOs:1787, 1788, and 1789, respectively, and (ii) a VL comprising a VL CDR1, VL CDR2, and VL CDR3 having an amino acid sequence of SEQ ID NOs:1790, 1791, and 1792, respectively. In one aspect, provided herein is an antibody that binds TRGV9, comprising: (i) a VH comprising a VH CDR1, a VH CDR2, and a VH CDR3 having an amino acid sequence of SEQ ID NOs:1793, 1794, and 1795, respectively, and (ii) a VL comprising a VL CDR1, VL CDR2, and VL CDR3 having an amino acid sequence of SEQ ID NOs:1796, 1797, and 1798, respectively. In one aspect, provided herein is an antibody that binds TRGV9, comprising: (i) a VH comprising a VH CDR1, a VH CDR2, and a VH CDR3 having an amino acid sequence of a VH CDR1, a VH CDR2, and a VH CDR3, respectively, of a VH having an amino acid sequence of SEQ ID NO:1799; and (ii) a VL comprising a VL CDR1, a VL CDR2, and a VL CDR3 having an amino acid sequence of a VL CDR1, a VL CDR2, and a VL CDR3, respectively, of SEQ ID NO:1800. In one aspect, provided herein is an antibody that binds TRGV9, comprising a VH having an amino acid sequence of SEQ ID NO:1799. In one aspect, provided herein is an antibody that binds TRGV9, comprising a VL having an amino acid sequence of SEQ ID NO:1800. In one aspect, provided herein is an antibody that binds TRGV9, comprising a VH having an amino acid sequence of SEQ ID NO:1799, and a VL having an amino acid sequence of SEQ ID NO:1800. In one aspect, provided herein is an antibody that binds TRGV9, comprising a heavy chain having an amino acid sequence of SEQ ID NO:1801. In one aspect, provided herein is an antibody that binds TRGV9, comprising a light chain having an amino acid sequence of SEQ ID NO:1802. In one aspect, provided herein is an antibody that binds TRGV9, comprising a heavy chain having an amino acid sequence of SEQ ID NO:1801, and a light chain having an amino acid sequence of SEQ ID NO:1802. In one aspect, provided herein is an antibody that binds TRGV9, comprising a VH having an amino acid sequence having at least 95% identity to an amino acid sequence of SEQ ID NO:1799. In one aspect, provided herein is an antibody that binds TRGV9, comprising a VL having an amino acid sequence having at least 95% identity to an amino acid sequence of SEQ ID NO:1800. In one aspect, provided herein is an antibody that binds TRGV9, comprising a VH having an amino acid sequence having at least 95% identity to an amino acid sequence of SEQ ID NO:1799, and a VL having an amino acid sequence having at least 95% identity to an amino acid sequence of SEQ ID NO:1800. In one aspect, provided herein is an antibody that binds TRGV9, comprising a heavy chain having an amino acid sequence having at least 95% identity to an amino acid sequence of SEQ ID NO:1801. In one aspect, provided herein is an antibody that binds TRGV9, comprising a light chain having an amino acid sequence having at least 95% identity to an amino acid sequence of SEQ ID NO:1802. In one aspect, provided herein is an antibody that binds TRGV9, comprising a heavy chain having an amino acid sequence having at least 95% identity to an amino acid sequence of SEQ ID NO:1801, and a light chain having an amino acid sequence having at least 95% identity to an amino acid sequence of SEQ ID NO:1802.

[0152] In one aspect, provided herein is an antibody that binds TRGV9, comprising: (i) a VH comprising a VH CDR1, a VH CDR2, and a VH CDR3 having an amino acid sequence of SEQ ID NOs:1803, 1804, and 1805, respectively, and (ii) a VL comprising a VL CDR1, VL CDR2, and VL CDR3 having an amino acid sequence of SEQ ID NOs:1806, 1807, and 1808, respectively. In one aspect, provided herein is an antibody that binds TRGV9, comprising: (i) a VH comprising a VH CDR1, a VH CDR2, and a VH CDR3 having an amino acid sequence of SEQ ID NOs:1809, 1810, and 1811, respectively, and (ii) a VL comprising a VL CDR1, VL CDR2, and VL CDR3 having an amino acid sequence of SEQ ID NOs:1812, 1813, and 1814, respectively. In one aspect, provided herein is an antibody that binds TRGV9, comprising: (i) a VH comprising a VH CDR1, a VH CDR2, and a VH CDR3 having an amino acid sequence of SEQ ID NOs:1815, 1816, and 1817, respectively, and (ii) a VL comprising a VL CDR1, VL CDR2, and VL CDR3 having an amino acid sequence of SEQ ID NOs:1818, 1819, and 1820, respectively. In one aspect, provided herein is an antibody that binds TRGV9, comprising: (i) a VH comprising a VH CDR1, a VH CDR2, and a VH CDR3 having an amino acid sequence of SEQ ID NOs:1821, 1822, and 1823, respectively, and (ii) a VL comprising a VL CDR1, VL CDR2, and VL CDR3 having an amino acid sequence of SEQ ID NOs:1824, 1825, and 1826, respectively. In one aspect, provided herein is an antibody that binds TRGV9, comprising: (i) a VH comprising a VH CDR1, a VH CDR2, and a VH CDR3 having an amino acid sequence of SEQ ID NOs:1827, 1828, and 1829, respectively, and (ii) a VL comprising a VL CDR1, VL CDR2, and VL CDR3 having an amino acid sequence of SEQ ID NOs:1830, 1831, and 1832, respectively. In one aspect, provided herein is an antibody that binds TRGV9, comprising: (i) a VH comprising a VH CDR1, a VH CDR2, and a VH CDR3 having an amino acid sequence of a VH CDR1, a VH CDR2, and a VH CDR3, respectively, of a VH having an amino acid sequence of SEQ ID NO:1833; and (ii) a VL comprising a VL CDR1, a VL CDR2, and a VL CDR3 having an amino acid sequence of a VL CDR1, a VL CDR2, and a VL CDR3, respectively, of SEQ ID NO:1834. In one aspect, provided herein is an antibody that binds TRGV9, comprising a VH having an amino acid sequence of SEQ ID NO:1833. In one aspect, provided herein is an antibody that binds TRGV9, comprising a VL having an amino acid sequence of SEQ ID NO:1834. In one aspect, provided herein is an antibody that binds TRGV9, comprising a VH having an amino acid sequence of SEQ ID NO:1833, and a VL having an amino acid sequence of SEQ ID NO:1834. In one aspect, provided herein is an antibody that binds TRGV9, comprising a heavy chain having an amino acid sequence of SEQ ID NO:1835. In one aspect, provided herein is an antibody that binds TRGV9, comprising a light chain having an amino acid sequence of SEQ ID NO:1836. In one aspect, provided herein is an antibody that binds TRGV9, comprising a heavy chain having an amino acid sequence of SEQ ID NO:1835, and a light chain having an amino acid sequence of SEQ ID NO:1836. In one aspect, provided herein is an antibody that binds TRGV9, comprising a VH having an amino acid sequence having at least 95% identity to an amino acid sequence of SEQ ID NO:1833. In one aspect, provided herein is an antibody that binds TRGV9, comprising a VL having an amino acid sequence having at least 95% identity to an amino acid sequence of SEQ ID NO:1834. In one aspect, provided herein is an antibody that binds TRGV9, comprising a VH having an amino acid sequence having at least 95% identity to an amino acid sequence of SEQ ID NO:1833, and a VL having an amino acid sequence having at least 95% identity to an amino acid sequence of SEQ ID NO:1834. In one aspect, provided herein is an antibody that binds TRGV9, comprising a heavy chain having an amino acid sequence having at least 95% identity to an amino acid sequence of SEQ ID NO:1835. In one aspect, provided herein is an antibody that binds TRGV9, comprising a light chain having an amino acid sequence having at least 95% identity to an amino acid sequence of SEQ ID NO:1836. In one aspect, provided herein is an antibody that binds TRGV9, comprising a heavy chain having an amino acid sequence having at least 95% identity to an amino acid sequence of SEQ ID NO:1835, and a light chain having an amino acid sequence having at least 95% identity to an amino acid sequence of SEQ ID NO:1836.

[0153] In one aspect, provided herein is an antibody that binds TRGV9, comprising: (i) a VH comprising a VH CDR1, a VH CDR2, and a VH CDR3 having an amino acid sequence of SEQ ID NOs:1837, 1838, and 1839, respectively, and (ii) a VL comprising a VL CDR1, VL CDR2, and VL CDR3 having an amino acid sequence of SEQ ID NOs:1840, 1841, and 1842, respectively. In one aspect, provided herein is an antibody that binds TRGV9, comprising: (i) a VH comprising a VH CDR1, a VH CDR2, and a VH CDR3 having an amino acid sequence of SEQ ID NOs:1843, 1844, and 1845, respectively, and (ii) a VL comprising a VL CDR1, VL CDR2, and VL CDR3 having an amino acid sequence of SEQ ID NOs:1846, 1847, and 1848, respectively. In one aspect, provided herein is an antibody that binds TRGV9, comprising: (i) a VH comprising a VH CDR1, a VH CDR2, and a VH CDR3 having an amino acid sequence of SEQ ID NOs:1849, 1850, and 1851, respectively, and (ii) a VL comprising a VL CDR1, VL CDR2, and VL CDR3 having an amino acid sequence of SEQ ID NOs:1852, 1853, and 1854, respectively. In one aspect, provided herein is an antibody that binds TRGV9, comprising: (i) a VH comprising a VH CDR1, a VH CDR2, and a VH CDR3 having an amino acid sequence of SEQ ID NOs:1855, 1856, and 1857, respectively, and (ii) a VL comprising a VL CDR1, VL CDR2, and VL CDR3 having an amino acid sequence of SEQ ID NOs:1858, 1859, and 1860, respectively. In one aspect, provided herein is an antibody that binds TRGV9, comprising: (i) a VH comprising a VH CDR1, a VH CDR2, and a VH CDR3 having an amino acid sequence of SEQ ID NOs:1861, 1862, and 1863, respectively, and (ii) a VL comprising a VL CDR1, VL CDR2, and VL CDR3 having an amino acid sequence of SEQ ID NOs:1864, 1865, and 1866, respectively. In one aspect, provided herein is an antibody that binds TRGV9, comprising: (i) a VH comprising a VH CDR1, a VH CDR2, and a VH CDR3 having an amino acid sequence of a VH CDR1, a VH CDR2, and a VH CDR3, respectively, of a VH having an amino acid sequence of SEQ ID NO:1867; and (ii) a VL comprising a VL CDR1, a VL CDR2, and a VL CDR3 having an amino acid sequence of a VL CDR1, a VL CDR2, and a VL CDR3, respectively, of SEQ ID NO:1868. In one aspect, provided herein is an antibody that binds TRGV9, comprising a VH having an amino acid sequence of SEQ ID NO:1867. In one aspect, provided herein is an antibody that binds TRGV9, comprising a VL having an amino acid sequence of SEQ ID NO:1868. In one aspect, provided herein is an antibody that binds TRGV9, comprising a VH having an amino acid sequence of SEQ ID NO:1867, and a VL having an amino acid sequence of SEQ ID NO:1868. In one aspect, provided herein is an antibody that binds TRGV9, comprising a heavy chain having an amino acid sequence of SEQ ID NO:1869. In one aspect, provided herein is an antibody that binds TRGV9, comprising a light chain having an amino acid sequence of SEQ ID NO:1870. In one aspect, provided herein is an antibody that binds TRGV9, comprising a heavy chain having an amino acid sequence of SEQ ID NO:1869, and a light chain having an amino acid sequence of SEQ ID NO:1870. In one aspect, provided herein is an antibody that binds TRGV9, comprising a VH having an amino acid sequence having at least 95% identity to an amino acid sequence of SEQ ID NO:1867. In one aspect, provided herein is an antibody that binds TRGV9, comprising a VL having an amino acid sequence having at least 95% identity to an amino acid sequence of SEQ ID NO:1868. In one aspect, provided herein is an antibody that binds TRGV9, comprising a VH having an amino acid sequence having at least 95% identity to an amino acid sequence of SEQ ID NO:1867, and a VL having an amino acid sequence having at least 95% identity to an amino acid sequence of SEQ ID NO:1868. In one aspect, provided herein is an antibody that binds TRGV9, comprising a heavy chain having an amino acid sequence having at least 95% identity to an amino acid sequence of SEQ ID NO:1869. In one aspect, provided herein is an antibody that binds TRGV9, comprising a light chain having an amino acid sequence having at least 95% identity to an amino acid sequence of SEQ ID NO:1870. In one aspect, provided herein is an antibody that binds TRGV9, comprising a heavy chain having an amino acid sequence having at least 95% identity to an amino acid sequence of SEQ ID NO:1869, and a light chain having an amino acid sequence having at least 95% identity to an amino acid sequence of SEQ ID NO:1870.

[0154] In one aspect, provided herein is an antibody that binds TRGV9, comprising: (i) a VH comprising a VH CDR1, a VH CDR2, and a VH CDR3 having an amino acid sequence of SEQ ID NOs:1871, 1872, and 1873, respectively, and (ii) a VL comprising a VL CDR1, VL CDR2, and VL CDR3 having an amino acid sequence of SEQ ID NOs:1874, 1875, and 1876, respectively. In one aspect, provided herein is an antibody that binds TRGV9, comprising: (i) a VH comprising a VH CDR1, a VH CDR2, and a VH CDR3 having an amino acid sequence of SEQ ID NOs:1877, 1878, and 1879, respectively, and (ii) a VL comprising a VL CDR1, VL CDR2, and VL CDR3 having an amino acid sequence of SEQ ID NOs:1880, 1881, and 1882, respectively. In one aspect, provided herein is an antibody that binds TRGV9, comprising: (i) a VH comprising a VH CDR1, a VH CDR2, and a VH CDR3 having an amino acid sequence of SEQ ID NOs:1883, 1884, and 1885, respectively, and (ii) a VL comprising a VL CDR1, VL CDR2, and VL CDR3 having an amino acid sequence of SEQ ID NOs:1886, 1887, and 1888, respectively. In one aspect, provided herein is an antibody that binds TRGV9, comprising: (i) a VH comprising a VH CDR1, a VH CDR2, and a VH CDR3 having an amino acid sequence of SEQ ID NOs:1889, 1890, and 1891, respectively, and (ii) a VL comprising a VL CDR1, VL CDR2, and VL CDR3 having an amino acid sequence of SEQ ID NOs:1892, 1893, and 1894, respectively. In one aspect, provided herein is an antibody that binds TRGV9, comprising: (i) a VH comprising a VH CDR1, a VH CDR2, and a VH CDR3 having an amino acid sequence of SEQ ID NOs:1895, 1896, and 1897, respectively, and (ii) a VL comprising a VL CDR1, VL CDR2, and VL CDR3 having an amino acid sequence of SEQ ID NOs:1898, 1899, and 1900, respectively. In one aspect, provided herein is an antibody that binds TRGV9, comprising: (i) a VH comprising a VH CDR1, a VH CDR2, and a VH CDR3 having an amino acid sequence of a VH CDR1, a VH CDR2, and a VH CDR3, respectively, of a VH having an amino acid sequence of SEQ ID NO:1901; and (ii) a VL comprising a VL CDR1, a VL CDR2, and a VL CDR3 having an amino acid sequence of a VL CDR1, a VL CDR2, and a VL CDR3, respectively, of SEQ ID NO:1902. In one aspect, provided herein is an antibody that binds TRGV9, comprising a VH having an amino acid sequence of SEQ ID NO:1901. In one aspect, provided herein is an antibody that binds TRGV9, comprising a VL having an amino acid sequence of SEQ ID NO:1902. In one aspect, provided herein is an antibody that binds TRGV9, comprising a VH having an amino acid sequence of SEQ ID NO:1901, and a VL having an amino acid sequence of SEQ ID NO:1902. In one aspect, provided herein is an antibody that binds TRGV9, comprising a heavy chain having an amino acid sequence of SEQ ID NO:1903. In one aspect, provided herein is an antibody that binds TRGV9, comprising a light chain having an amino acid sequence of SEQ ID NO:1904. In one aspect, provided herein is an antibody that binds TRGV9, comprising a heavy chain having an amino acid sequence of SEQ ID NO:1903, and a light chain having an amino acid sequence of SEQ ID NO:1904. In one aspect, provided herein is an antibody that binds TRGV9, comprising a VH having an amino acid sequence having at least 95% identity to an amino acid sequence of SEQ ID NO:1901. In one aspect, provided herein is an antibody that binds TRGV9, comprising a VL having an amino acid sequence having at least 95% identity to an amino acid sequence of SEQ ID NO:1902. In one aspect, provided herein is an antibody that binds TRGV9, comprising a VH having an amino acid sequence having at least 95% identity to an amino acid sequence of SEQ ID NO:1901, and a VL having an amino acid sequence having at least 95% identity to an amino acid sequence of SEQ ID NO:1902. In one aspect, provided herein is an antibody that binds TRGV9, comprising a heavy chain having an amino acid sequence having at least 95% identity to an amino acid sequence of SEQ ID NO:1903. In one aspect, provided herein is an antibody that binds TRGV9, comprising a light chain having an amino acid sequence having at least 95% identity to an amino acid sequence of SEQ ID NO:1904. In one aspect, provided herein is an antibody that binds TRGV9, comprising a heavy chain having an amino acid sequence having at least 95% identity to an amino acid sequence of SEQ ID NO:1903, and a light chain having an amino acid sequence having at least 95% identity to an amino acid sequence of SEQ ID NO:1904.

[0155] In one aspect, provided herein is an antibody that binds TRGV9, comprising: (i) a VH comprising a VH CDR1, a VH CDR2, and a VH CDR3 having an amino acid sequence of SEQ ID NOs:1905, 1906, and 1907, respectively, and (ii) a VL comprising a VL CDR1, VL CDR2, and VL CDR3 having an amino acid sequence of SEQ ID NOs:1908, 1909, and 1910, respectively. In one aspect, provided herein is an antibody that binds TRGV9, comprising: (i) a VH comprising a VH CDR1, a VH CDR2, and a VH CDR3 having an amino acid sequence of SEQ ID NOs:1911, 1912, and 1913, respectively, and (ii) a VL comprising a VL CDR1, VL CDR2, and VL CDR3 having an amino acid sequence of SEQ ID NOs:1914, 1915, and 1916, respectively. In one aspect, provided herein is an antibody that binds TRGV9, comprising: (i) a VH comprising a VH CDR1, a VH CDR2, and a VH CDR3 having an amino acid sequence of SEQ ID NOs:1917, 1918, and 1919, respectively, and (ii) a VL comprising a VL CDR1, VL CDR2, and VL CDR3 having an amino acid sequence of SEQ ID NOs:1920, 1921, and 1922, respectively. In one aspect, provided herein is an antibody that binds TRGV9, comprising: (i) a VH comprising a VH CDR1, a VH CDR2, and a VH CDR3 having an amino acid sequence of SEQ ID NOs:1923, 1924, and 1925, respectively, and (ii) a VL comprising a VL CDR1, VL CDR2, and VL CDR3 having an amino acid sequence of SEQ ID NOs:1926, 1927, and 1928, respectively. In one aspect, provided herein is an antibody that binds TRGV9, comprising: (i) a VH comprising a VH CDR1, a VH CDR2, and a VH CDR3 having an amino acid sequence of SEQ ID NOs:1929, 1930, and 1931, respectively, and (ii) a VL comprising a VL CDR1, VL CDR2, and VL CDR3 having an amino acid sequence of SEQ ID NOs:1932, 1933, and 1934, respectively. In one aspect, provided herein is an antibody that binds TRGV9, comprising: (i) a VH comprising a VH CDR1, a VH CDR2, and a VH CDR3 having an amino acid sequence of a VH CDR1, a VH CDR2, and a VH CDR3, respectively, of a VH having an amino acid sequence of SEQ ID NO:1935; and (ii) a VL comprising a VL CDR1, a VL CDR2, and a VL CDR3 having an amino acid sequence of a VL CDR1, a VL CDR2, and a VL CDR3, respectively, of SEQ ID NO:1936. In one aspect, provided herein is an antibody that binds TRGV9, comprising a VH having an amino acid sequence of SEQ ID NO:1935. In one aspect, provided herein is an antibody that binds TRGV9, comprising a VL having an amino acid sequence of SEQ ID NO:1936. In one aspect, provided herein is an antibody that binds TRGV9, comprising a VH having an amino acid sequence of SEQ ID NO:1935, and a VL having an amino acid sequence of SEQ ID NO:1936. In one aspect, provided herein is an antibody that binds TRGV9, comprising a heavy chain having an amino acid sequence of SEQ ID NO:1937. In one aspect, provided herein is an antibody that binds TRGV9, comprising a light chain having an amino acid sequence of SEQ ID NO:1938. In one aspect, provided herein is an antibody that binds TRGV9, comprising a heavy chain having an amino acid sequence of SEQ ID NO:1937, and a light chain having an amino acid sequence of SEQ ID NO:1938. In one aspect, provided herein is an antibody that binds TRGV9, comprising a VH having an amino acid sequence having at least 95% identity to an amino acid sequence of SEQ ID NO:1935. In one aspect, provided herein is an antibody that binds TRGV9, comprising a VL having an amino acid sequence having at least 95% identity to an amino acid sequence of SEQ ID NO:1936. In one aspect, provided herein is an antibody that binds TRGV9, comprising a VH having an amino acid sequence having at least 95% identity to an amino acid sequence of SEQ ID NO:1935, and a VL having an amino acid sequence having at least 95% identity to an amino acid sequence of SEQ ID NO:1936. In one aspect, provided herein is an antibody that binds TRGV9, comprising a heavy chain having an amino acid sequence having at least 95% identity to an amino acid sequence of SEQ ID NO:1937. In one aspect, provided herein is an antibody that binds TRGV9, comprising a light chain having an amino acid sequence having at least 95% identity to an amino acid sequence of SEQ ID NO:1938. In one aspect, provided herein is an antibody that binds TRGV9, comprising a heavy chain having an amino acid sequence having at least 95% identity to an amino acid sequence of SEQ ID NO:1937, and a light chain having an amino acid sequence having at least 95% identity to an amino acid sequence of SEQ ID NO:1938.

[0156] In one aspect, provided herein is an antibody that binds TRGV9, comprising: (i) a VH comprising a VH CDR1, a VH CDR2, and a VH CDR3 having an amino acid sequence of SEQ ID NOs:1939, 1940, and 1941, respectively, and (ii) a VL comprising a VL CDR1, VL CDR2, and VL CDR3 having an amino acid sequence of SEQ ID NOs:1942, 1943, and 1944, respectively. In one aspect, provided herein is an antibody that binds TRGV9, comprising: (i) a VH comprising a VH CDR1, a VH CDR2, and a VH CDR3 having an amino acid sequence of SEQ ID NOs:1945, 1946, and 1947, respectively, and (ii) a VL comprising a VL CDR1, VL CDR2, and VL CDR3 having an amino acid sequence of SEQ ID NOs:1948, 1949, and 1950, respectively. In one aspect, provided herein is an antibody that binds TRGV9, comprising: (i) a VH comprising a VH CDR1, a VH CDR2, and a VH CDR3 having an amino acid sequence of SEQ ID NOs:1951, 1952, and 1953, respectively, and (ii) a VL comprising a VL CDR1, VL CDR2, and VL CDR3 having an amino acid sequence of SEQ ID NOs:1954, 1955, and 1956, respectively. In one aspect, provided herein is an antibody that binds TRGV9, comprising: (i) a VH comprising a VH CDR1, a VH CDR2, and a VH CDR3 having an amino acid sequence of SEQ ID NOs:1957, 1958, and 1959, respectively, and (ii) a VL comprising a VL CDR1, VL CDR2, and VL CDR3 having an amino acid sequence of SEQ ID NOs:1960, 1961, and 1962, respectively. In one aspect, provided herein is an antibody that binds TRGV9, comprising: (i) a VH comprising a VH CDR1, a VH CDR2, and a VH CDR3 having an amino acid sequence of SEQ ID NOs:1963, 1964, and 1965, respectively, and (ii) a VL comprising a VL CDR1, VL CDR2, and VL CDR3 having an amino acid sequence of SEQ ID NOs:1966, 1967, and 1968, respectively. In one aspect, provided herein is an antibody that binds TRGV9, comprising: (i) a VH comprising a VH CDR1, a VH CDR2, and a VH CDR3 having an amino acid sequence of a VH CDR1, a VH CDR2, and a VH CDR3, respectively, of a VH having an amino acid sequence of SEQ ID NO:1969; and (ii) a VL comprising a VL CDR1, a VL CDR2, and a VL CDR3 having an amino acid sequence of a VL CDR1, a VL CDR2, and a VL CDR3, respectively, of SEQ ID NO:1970. In one aspect, provided herein is an antibody that binds TRGV9, comprising a VH having an amino acid sequence of SEQ ID NO:1969. In one aspect, provided herein is an antibody that binds TRGV9, comprising a VL having an amino acid sequence of SEQ ID NO:1970. In one aspect, provided herein is an antibody that binds TRGV9, comprising a VH having an amino acid sequence of SEQ ID NO:1969, and a VL having an amino acid sequence of SEQ ID NO:1970. In one aspect, provided herein is an antibody that binds TRGV9, comprising a heavy chain having an amino acid sequence of SEQ ID NO:1971. In one aspect, provided herein is an antibody that binds TRGV9, comprising a light chain having an amino acid sequence of SEQ ID NO:1972. In one aspect, provided herein is an antibody that binds TRGV9, comprising a heavy chain having an amino acid sequence of SEQ ID NO:1971, and a light chain having an amino acid sequence of SEQ ID NO:1972. In one aspect, provided herein is an antibody that binds TRGV9, comprising a VH having an amino acid sequence having at least 95% identity to an amino acid sequence of SEQ ID NO:1969. In one aspect, provided herein is an antibody that binds TRGV9, comprising a VL having an amino acid sequence having at least 95% identity to an amino acid sequence of SEQ ID NO:1970. In one aspect, provided herein is an antibody that binds TRGV9, comprising a VH having an amino acid sequence having at least 95% identity to an amino acid sequence of SEQ ID NO:1969, and a VL having an amino acid sequence having at least 95% identity to an amino acid sequence of SEQ ID NO:1970. In one aspect, provided herein is an antibody that binds TRGV9, comprising a heavy chain having an amino acid sequence having at least 95% identity to an amino acid sequence of SEQ ID NO:1971. In one aspect, provided herein is an antibody that binds TRGV9, comprising a light chain having an amino acid sequence having at least 95% identity to an amino acid sequence of SEQ ID NO:1972. In one aspect, provided herein is an antibody that binds TRGV9, comprising a heavy chain having an amino acid sequence having at least 95% identity to an amino acid sequence of SEQ ID NO:1971, and a light chain having an amino acid sequence having at least 95% identity to an amino acid sequence of SEQ ID NO:1972.

[0157] In one aspect, provided herein is an antibody that binds TRGV9, comprising: (i) a VH comprising a VH CDR1, a VH CDR2, and a VH CDR3 having an amino acid sequence of SEQ ID NOs:1973, 1974, and 1975, respectively, and (ii) a VL comprising a VL CDR1, VL CDR2, and VL CDR3 having an amino acid sequence of SEQ ID NOs:1976, 1977, and 1978, respectively. In one aspect, provided herein is an antibody that binds TRGV9, comprising: (i) a VH comprising a VH CDR1, a VH CDR2, and a VH CDR3 having an amino acid sequence of SEQ ID NOs:1979, 1980, and 1981, respectively, and (ii) a VL comprising a VL CDR1, VL CDR2, and VL CDR3 having an amino acid sequence of SEQ ID NOs:1982, 1983, and 1984, respectively. In one aspect, provided herein is an antibody that binds TRGV9, comprising: (i) a VH comprising a VH CDR1, a VH CDR2, and a VH CDR3 having an amino acid sequence of SEQ ID NOs:1985, 1986, and 1987, respectively, and (ii) a VL comprising a VL CDR1, VL CDR2, and VL CDR3 having an amino acid sequence of SEQ ID NOs:1988, 1989, and 1990, respectively. In one aspect, provided herein is an antibody that binds TRGV9, comprising: (i) a VH comprising a VH CDR1, a VH CDR2, and a VH CDR3 having an amino acid sequence of SEQ ID NOs:1991, 1992, and 1993, respectively, and (ii) a VL comprising a VL CDR1, VL CDR2, and VL CDR3 having an amino acid sequence of SEQ ID NOs:1994, 1995, and 1996, respectively. In one aspect, provided herein is an antibody that binds TRGV9, comprising: (i) a VH comprising a VH CDR1, a VH CDR2, and a VH CDR3 having an amino acid sequence of SEQ ID NOs:1997, 1998, and 1999, respectively, and (ii) a VL comprising a VL CDR1, VL CDR2, and VL CDR3 having an amino acid sequence of SEQ ID NOs:2000, 2001, and 2002, respectively. In one aspect, provided herein is an antibody that binds TRGV9, comprising: (i) a VH comprising a VH CDR1, a VH CDR2, and a VH CDR3 having an amino acid sequence of a VH CDR1, a VH CDR2, and a VH CDR3, respectively, of a VH having an amino acid sequence of SEQ ID NO:2003; and (ii) a VL comprising a VL CDR1, a VL CDR2, and a VL CDR3 having an amino acid sequence of a VL CDR1, a VL CDR2, and a VL CDR3, respectively, of SEQ ID NO:2004. In one aspect, provided herein is an antibody that binds TRGV9, comprising a VH having an amino acid sequence of SEQ ID NO:2003. In one aspect, provided herein is an antibody that binds TRGV9, comprising a VL having an amino acid sequence of SEQ ID NO:2004. In one aspect, provided herein is an antibody that binds TRGV9, comprising a VH having an amino acid sequence of SEQ ID NO:2003, and a VL having an amino acid sequence of SEQ ID NO:2004. In one aspect, provided herein is an antibody that binds TRGV9, comprising a heavy chain having an amino acid sequence of SEQ ID NO:2005. In one aspect, provided herein is an antibody that binds TRGV9, comprising a light chain having an amino acid sequence of SEQ ID NO:2006. In one aspect, provided herein is an antibody that binds TRGV9, comprising a heavy chain having an amino acid sequence of SEQ ID NO:2005, and a light chain having an amino acid sequence of SEQ ID NO:2006. In one aspect, provided herein is an antibody that binds TRGV9, comprising a VH having an amino acid sequence having at least 95% identity to an amino acid sequence of SEQ ID NO:2003. In one aspect, provided herein is an antibody that binds TRGV9, comprising a VL having an amino acid sequence having at least 95% identity to an amino acid sequence of SEQ ID NO:2004. In one aspect, provided herein is an antibody that binds TRGV9, comprising a VH having an amino acid sequence having at least 95% identity to an amino acid sequence of SEQ ID NO:2003, and a VL having an amino acid sequence having at least 95% identity to an amino acid sequence of SEQ ID NO:2004. In one aspect, provided herein is an antibody that binds TRGV9, comprising a heavy chain having an amino acid sequence having at least 95% identity to an amino acid sequence of SEQ ID NO:2005. In one aspect, provided herein is an antibody that binds TRGV9, comprising a light chain having an amino acid sequence having at least 95% identity to an amino acid sequence of SEQ ID NO:2006. In one aspect, provided herein is an antibody that binds TRGV9, comprising a heavy chain having an amino acid sequence having at least 95% identity to an amino acid sequence of SEQ ID NO:2005, and a light chain having an amino acid sequence having at least 95% identity to an amino acid sequence of SEQ ID NO:2006.

[0158] In one aspect, provided herein is an antibody that binds TRGV9. In one embodiment, the TRGV9 antibody comprises: a VH comprising a VH CDR1, a VH CDR2, and a VH CDR3 having an amino acid sequence of a VH CDR1, a VH CDR2, and a VH CDR3, respectively, of a VH having an amino acid sequence of SEQ ID NO:31. In one embodiment, the TRGV9 antibody comprises: a VL comprising a VL CDR1, a VL CDR2, and a VL CDR3 having an amino acid sequence of a VL CDR1, a VL CDR2, and a VL CDR3, respectively, of a VL having an amino acid sequence of SEQ ID NO:32. In one embodiment, the TRGV9 antibody comprises: a VH comprising a VH CDR1, a VH CDR2, and a VH CDR3 having an amino acid sequence of a VH CDR1, a VH CDR2, and a VH CDR3, respectively, of a VH having an amino acid sequence of SEQ ID NO:31; and a VL comprising a VL CDR1, a VL CDR2, and a VL CDR3 having an amino acid sequence of a VL CDR1, a VL CDR2, and a VL CDR3, respectively, of a VL having an amino acid sequence of SEQ ID NO:32. In one embodiment, the TRGV9 antibody comprises: a VH comprising a VH CDR1, a VH CDR2, and a VH CDR3 having an amino acid sequence of a VH CDR1, a VH CDR2, and a VH CDR3, respectively, of a VH having an amino acid sequence of SEQ ID NO:65. In one embodiment, the TRGV9 antibody comprises: a VL comprising a VL CDR1, a VL CDR2, and a VL CDR3 having an amino acid sequence of a VL CDR1, a VL CDR2, and a VL CDR3, respectively, of a VL having an amino acid sequence of SEQ ID NO:66. In one embodiment, the TRGV9 antibody comprises: a VH comprising a VH CDR1, a VH CDR2, and a VH CDR3 having an amino acid sequence of a VH CDR1, a VH CDR2, and a VH CDR3, respectively, of a VH having an amino acid sequence of SEQ ID NO:65; and a VL comprising a VL CDR1, a VL CDR2, and a VL CDR3 having an amino acid sequence of a VL CDR1, a VL CDR2, and a VL CDR3, respectively, of a VL having an amino acid sequence of SEQ ID NO:66. In one embodiment, the TRGV9 antibody comprises: a VH comprising a VH CDR1, a VH CDR2, and a VH CDR3 having an amino acid sequence of a VH CDR1, a VH CDR2, and a VH CDR3, respectively, of a VH having an amino acid sequence of SEQ ID NO:99. In one embodiment, the TRGV9 antibody comprises: a VL comprising a VL CDR1, a VL CDR2, and a VL CDR3 having an amino acid sequence of a VL CDR1, a VL CDR2, and a VL CDR3, respectively, of a VL having an amino acid sequence of SEQ ID NO:100. In one embodiment, the TRGV9 antibody comprises: a VH comprising a VH CDR1, a VH CDR2, and a VH CDR3 having an amino acid sequence of a VH CDR1, a VH CDR2, and a VH CDR3, respectively, of a VH having an amino acid sequence of SEQ ID NO:99; and a VL comprising a VL CDR1, a VL CDR2, and a VL CDR3 having an amino acid sequence of a VL CDR1, a VL CDR2, and a VL CDR3, respectively, of a VL having an amino acid sequence of SEQ ID NO:100. In one embodiment, the TRGV9 antibody comprises: a VH comprising a VH CDR1, a VH CDR2, and a VH CDR3 having an amino acid sequence of a VH CDR1, a VH CDR2, and a VH CDR3, respectively, of a VH having an amino acid sequence of SEQ ID NO:133. In one embodiment, the TRGV9 antibody comprises: a VL comprising a VL CDR1, a VL CDR2, and a VL CDR3 having an amino acid sequence of a VL CDR1, a VL CDR2, and a VL CDR3, respectively, of a VL having an amino acid sequence of SEQ ID NO:134. In one embodiment, the TRGV9 antibody comprises: a VH comprising a VH CDR1, a VH CDR2, and a VH CDR3 having an amino acid sequence of a VH CDR1, a VH CDR2, and a VH CDR3, respectively, of a VH having an amino acid sequence of SEQ ID NO:133; and a VL comprising a VL CDR1, a VL CDR2, and a VL CDR3 having an amino acid sequence of a VL CDR1, a VL CDR2, and a VL CDR3, respectively, of a VL having an amino acid sequence of SEQ ID NO:134. In one embodiment, the TRGV9 antibody comprises: a VH comprising a VH CDR1, a VH CDR2, and a VH CDR3 having an amino acid sequence of a VH CDR1, a VH CDR2, and a VH CDR3, respectively, of a VH having an amino acid sequence of SEQ ID NO:167. In one embodiment, the TRGV9 antibody comprises: a VL comprising a VL CDR1, a VL CDR2, and a VL CDR3 having an amino acid sequence of a VL CDR1, a VL CDR2, and a VL CDR3, respectively, of a VL having an amino acid sequence of SEQ ID NO:168. In one embodiment, the TRGV9 antibody comprises: a VH comprising a VH CDR1, a VH CDR2, and a VH CDR3 having an amino acid sequence of a VH CDR1, a VH CDR2, and a VH CDR3, respectively, of a VH having an amino acid sequence of SEQ ID NO:167; and a VL comprising a VL CDR1, a VL CDR2, and a VL CDR3 having an amino acid sequence of a VL CDR1, a VL CDR2, and a VL CDR3, respectively, of a VL having an amino acid sequence of SEQ ID NO:168. In one embodiment, the TRGV9 antibody comprises: a VH comprising a VH CDR1, a VH CDR2, and a VH CDR3 having an amino acid sequence of a VH CDR1, a VH CDR2, and a VH CDR3, respectively, of a VH having an amino acid sequence of SEQ ID NO:201. In one embodiment, the TRGV9 antibody comprises: a VL comprising a VL CDR1, a VL CDR2, and a VL CDR3 having an amino acid sequence of a VL CDR1, a VL CDR2, and a VL CDR3, respectively, of a VL having an amino acid sequence of SEQ ID NO:202. In one embodiment, the TRGV9 antibody comprises: a VH comprising a VH CDR1, a VH CDR2, and a VH CDR3 having an amino acid sequence of a VH CDR1, a VH CDR2, and a VH CDR3, respectively, of a VH having an amino acid sequence of SEQ ID NO:201; and a VL comprising a VL CDR1, a VL CDR2, and a VL CDR3 having an amino acid sequence of a VL CDR1, a VL CDR2, and a VL CDR3, respectively, of a VL having an amino acid sequence of SEQ ID NO:202. In one embodiment, the TRGV9 antibody comprises: a VH comprising a VH CDR1, a VH CDR2, and a VH CDR3 having an amino acid sequence of a VH CDR1, a VH CDR2, and a VH CDR3, respectively, of a VH having an amino acid sequence of SEQ ID NO:235. In one embodiment, the TRGV9 antibody comprises: a VL comprising a VL CDR1, a VL CDR2, and a VL CDR3 having an amino acid sequence of a VL CDR1, a VL CDR2, and a VL CDR3, respectively, of a VL having an amino acid sequence of SEQ ID NO:236. In one embodiment, the TRGV9 antibody comprises: a VH comprising a VH CDR1, a VH CDR2, and a VH CDR3 having an amino acid sequence of a VH CDR1, a VH CDR2, and a VH CDR3, respectively, of a VH having an amino acid sequence of SEQ ID NO:235; and a VL comprising a VL CDR1, a VL CDR2, and a VL CDR3 having an amino acid sequence of a VL CDR1, a VL CDR2, and a VL CDR3, respectively, of a VL having an amino acid sequence of SEQ ID NO:236. In one embodiment, the TRGV9 antibody comprises: a VH comprising a VH CDR1, a VH CDR2, and a VH CDR3 having an amino acid sequence of a VH CDR1, a VH CDR2, and a VH CDR3, respectively, of a VH having an amino acid sequence of SEQ ID NO:269. In one embodiment, the TRGV9 antibody comprises: a VL comprising a VL CDR1, a VL CDR2, and a VL CDR3 having an amino acid sequence of a VL CDR1, a VL CDR2, and a VL CDR3, respectively, of a VL having an amino acid sequence of SEQ ID NO:270. In one embodiment, the TRGV9 antibody comprises: a VH comprising a VH CDR1, a VH CDR2, and a VH CDR3 having an amino acid sequence of a VH CDR1, a VH CDR2, and a VH CDR3, respectively, of a VH having an amino acid sequence of SEQ ID NO:269; and a VL comprising a VL CDR1, a VL CDR2, and a VL CDR3 having an amino acid sequence of a VL CDR1, a VL CDR2, and a VL CDR3, respectively, of a VL having an amino acid sequence of SEQ ID NO:270. In one embodiment, the TRGV9 antibody comprises: a VH comprising a VH CDR1, a VH CDR2, and a VH CDR3 having an amino acid sequence of a VH CDR1, a VH CDR2, and a VH CDR3, respectively, of a VH having an amino acid sequence of SEQ ID NO:303. In one embodiment, the TRGV9 antibody comprises: a VL comprising a VL CDR1, a VL CDR2, and a VL CDR3 having an amino acid sequence of a VL CDR1, a VL CDR2, and a VL CDR3, respectively, of a VL having an amino acid sequence of SEQ ID NO:304. In one embodiment, the TRGV9 antibody comprises: a VH comprising a VH CDR1, a VH CDR2, and a VH CDR3 having an amino acid sequence of a VH CDR1, a VH CDR2, and a VH CDR3, respectively, of a VH having an amino acid sequence of SEQ ID NO:303; and a VL comprising a VL CDR1, a VL CDR2, and a VL CDR3 having an amino acid sequence of a VL CDR1, a VL CDR2, and a VL CDR3, respectively, of a VL having an amino acid sequence of SEQ ID NO:304. In one embodiment, the TRGV9 antibody comprises: a VH comprising a VH CDR1, a VH CDR2, and a VH CDR3 having an amino acid sequence of a VH CDR1, a VH CDR2, and a VH CDR3, respectively, of a VH having an amino acid sequence of SEQ ID NO:337. In one embodiment, the TRGV9 antibody comprises: a VL comprising a VL CDR1, a VL CDR2, and a VL CDR3 having an amino acid sequence of a VL CDR1, a VL CDR2, and a VL CDR3, respectively, of a VL having an amino acid sequence of SEQ ID NO:338. In one embodiment, the TRGV9 antibody comprises: a VH comprising a VH CDR1, a VH CDR2, and a VH CDR3 having an amino acid sequence of a VH CDR1, a VH CDR2, and a VH CDR3, respectively, of a VH having an amino acid sequence of SEQ ID NO:337; and a VL comprising a VL CDR1, a VL CDR2, and a VL CDR3 having an amino acid sequence of a VL CDR1, a VL CDR2, and a VL CDR3, respectively, of a VL having an amino acid sequence of SEQ ID NO:338. In one embodiment, the TRGV9 antibody comprises: a VH comprising a VH CDR1, a VH CDR2, and a VH CDR3 having an amino acid sequence of a VH CDR1, a VH CDR2, and a VH CDR3, respectively, of a VH having an amino acid sequence of SEQ ID NO:371. In one embodiment, the TRGV9 antibody comprises: a VL comprising a VL CDR1, a VL CDR2, and a VL CDR3 having an amino acid sequence of a VL CDR1, a VL CDR2, and a VL CDR3, respectively, of a VL having an amino acid sequence of SEQ ID NO:372. In one embodiment, the TRGV9 antibody comprises: a VH comprising a VH CDR1, a VH CDR2, and a VH CDR3 having an amino acid sequence of a VH CDR1, a VH CDR2, and a VH CDR3, respectively, of a VH having an amino acid sequence of SEQ ID NO:371; and a VL comprising a VL CDR1, a VL CDR2, and a VL CDR3 having an amino acid sequence of a VL CDR1, a VL CDR2, and a VL CDR3, respectively, of a VL having an amino acid sequence of SEQ ID NO:372. In one embodiment, the TRGV9 antibody comprises: a VH comprising a VH CDR1, a VH CDR2, and a VH CDR3 having an amino acid sequence of a VH CDR1, a VH CDR2, and a VH CDR3, respectively, of a VH having an amino acid sequence of SEQ ID NO:405. In one embodiment, the TRGV9 antibody comprises: a VL comprising a VL CDR1, a VL CDR2, and a VL CDR3 having an amino acid sequence of a VL CDR1, a VL CDR2, and a VL CDR3, respectively, of a VL having an amino acid sequence of SEQ ID NO:406. In one embodiment, the TRGV9 antibody comprises: a VH comprising a VH CDR1, a VH CDR2, and a VH CDR3 having an amino acid sequence of a VH CDR1, a VH CDR2, and a VH CDR3, respectively, of a VH having an amino acid sequence of SEQ ID NO:405; and a VL comprising a VL CDR1, a VL CDR2, and a VL CDR3 having an amino acid sequence of a VL CDR1, a VL CDR2, and a VL CDR3, respectively, of a VL having an amino acid sequence of SEQ ID NO:406. In one embodiment, the TRGV9 antibody comprises: a VH comprising a VH CDR1, a VH CDR2, and a VH CDR3 having an amino acid sequence of a VH CDR1, a VH CDR2, and a VH CDR3, respectively, of a VH having an amino acid sequence of SEQ ID NO:439. In one embodiment, the TRGV9 antibody comprises: a VL comprising a VL CDR1, a VL CDR2, and a VL CDR3 having an amino acid sequence of a VL CDR1, a VL CDR2, and a VL CDR3, respectively, of a VL having an amino acid sequence of SEQ ID NO:440. In one embodiment, the TRGV9 antibody comprises: a VH comprising a VH CDR1, a VH CDR2, and a VH CDR3 having an amino acid sequence of a VH CDR1, a VH CDR2, and a VH CDR3, respectively, of a VH having an amino acid sequence of SEQ ID NO:439; and a VL comprising a VL CDR1, a VL CDR2, and a VL CDR3 having an amino acid sequence of a VL CDR1, a VL CDR2, and a VL CDR3, respectively, of a VL having an amino acid sequence of SEQ ID NO:440. In one embodiment, the TRGV9 antibody comprises: a VH comprising a VH CDR1, a VH CDR2, and a VH CDR3 having an amino acid sequence of a VH CDR1, a VH CDR2, and a VH CDR3, respectively, of a VH having an amino acid sequence of SEQ ID NO:473. In one embodiment, the TRGV9 antibody comprises: a VL comprising a VL CDR1, a VL CDR2, and a VL CDR3 having an amino acid sequence of a VL CDR1, a VL CDR2, and a VL CDR3, respectively, of a VL having an amino acid sequence of SEQ ID NO:474. In one embodiment, the TRGV9 antibody comprises: a VH comprising a VH CDR1, a VH CDR2, and a VH CDR3 having an amino acid sequence of a VH CDR1, a VH CDR2, and a VH CDR3, respectively, of a VH having an amino acid sequence of SEQ ID NO:473; and a VL comprising a VL CDR1, a VL CDR2, and a VL CDR3 having an amino acid sequence of a VL CDR1, a VL CDR2, and a VL CDR3, respectively, of a VL having an amino acid sequence of SEQ ID NO:474. In one embodiment, the TRGV9 antibody comprises: a VH comprising a VH CDR1, a VH CDR2, and a VH CDR3 having an amino acid sequence of a VH CDR1, a VH CDR2, and a VH CDR3, respectively, of a VH having an amino acid sequence of SEQ ID NO:507. In one embodiment, the TRGV9 antibody comprises: a VL comprising a VL CDR1, a VL CDR2, and a VL CDR3 having an amino acid sequence of a VL CDR1, a VL CDR2, and a VL CDR3, respectively, of a VL having an amino acid sequence of SEQ ID NO:508. In one embodiment, the TRGV9 antibody comprises: a VH comprising a VH CDR1, a VH CDR2, and a VH CDR3 having an amino acid sequence of a VH CDR1, a VH CDR2, and a VH CDR3, respectively, of a VH having an amino acid sequence of SEQ ID NO:507; and a VL comprising a VL CDR1, a VL CDR2, and a VL CDR3 having an amino acid sequence of a VL CDR1, a VL CDR2, and a VL CDR3, respectively, of a VL having an amino acid sequence of SEQ ID NO:508. In one embodiment, the TRGV9 antibody comprises: a VH comprising a VH CDR1, a VH CDR2, and a VH CDR3 having an amino acid sequence of a VH CDR1, a VH CDR2, and a VH CDR3, respectively, of a VH having an amino acid sequence of SEQ ID NO:541. In one embodiment, the TRGV9 antibody comprises: a VL comprising a VL CDR1, a VL CDR2, and a VL CDR3 having an amino acid sequence of a VL CDR1, a VL CDR2, and a VL CDR3, respectively, of a VL having an amino acid sequence of SEQ ID NO:542. In one embodiment, the TRGV9 antibody comprises: a VH comprising a VH CDR1, a VH CDR2, and a VH CDR3 having an amino acid sequence of a VH CDR1, a VH CDR2, and a VH CDR3, respectively, of a VH having an amino acid sequence of SEQ ID NO:541; and a VL comprising a VL CDR1, a VL CDR2, and a VL CDR3 having an amino acid sequence of a VL CDR1, a VL CDR2, and a VL CDR3, respectively, of a VL having an amino acid sequence of SEQ ID NO:542. In one embodiment, the TRGV9 antibody comprises: a VH comprising a VH CDR1, a VH CDR2, and a VH CDR3 having an amino acid sequence of a VH CDR1, a VH CDR2, and a VH CDR3, respectively, of a VH having an amino acid sequence of SEQ ID NO:575. In one embodiment, the TRGV9 antibody comprises: a VL comprising a VL CDR1, a VL CDR2, and a VL CDR3 having an amino acid sequence of a VL CDR1, a VL CDR2, and a VL CDR3, respectively, of a VL having an amino acid sequence of SEQ ID NO:576. In one embodiment, the TRGV9 antibody comprises: a VH comprising a VH CDR1, a VH CDR2, and a VH CDR3 having an amino acid sequence of a VH CDR1, a VH CDR2, and a VH CDR3, respectively, of a VH having an amino acid sequence of SEQ ID NO:575; and a VL comprising a VL CDR1, a VL CDR2, and a VL CDR3 having an amino acid sequence of a VL CDR1, a VL CDR2, and a VL CDR3, respectively, of a VL having an amino acid sequence of SEQ ID NO:576. In one embodiment, the TRGV9 antibody comprises: a VH comprising a VH CDR1, a VH CDR2, and a VH CDR3 having an amino acid sequence of a VH CDR1, a VH CDR2, and a VH CDR3, respectively, of a VH having an amino acid sequence of SEQ ID NO:609. In one embodiment, the TRGV9 antibody comprises: a VL comprising a VL CDR1, a VL CDR2, and a VL CDR3 having an amino acid sequence of a VL CDR1, a VL CDR2, and a VL CDR3, respectively, of a VL having an amino acid sequence of SEQ ID NO:610. In one embodiment, the TRGV9 antibody comprises: a VH comprising a VH CDR1, a VH CDR2, and a VH CDR3 having an amino acid sequence of a VH CDR1, a VH CDR2, and a VH CDR3, respectively, of a VH having an amino acid sequence of SEQ ID NO:609; and a VL comprising a VL CDR1, a VL CDR2, and a VL CDR3 having an amino acid sequence of a VL CDR1, a VL CDR2, and a VL CDR3, respectively, of a VL having an amino acid sequence of SEQ ID NO:610. In one embodiment, the TRGV9 antibody comprises: a VH comprising a VH CDR1, a VH CDR2, and a VH CDR3 having an amino acid sequence of a VH CDR1, a VH CDR2, and a VH CDR3, respectively, of a VH having an amino acid sequence of SEQ ID NO:643. In one embodiment, the TRGV9 antibody comprises: a VL comprising a VL CDR1, a VL CDR2, and a VL CDR3 having an amino acid sequence of a VL CDR1, a VL CDR2, and a VL CDR3, respectively, of a VL having an amino acid sequence of SEQ ID NO:644. In one embodiment, the TRGV9 antibody comprises: a VH comprising a VH CDR1, a VH CDR2, and a VH CDR3 having an amino acid sequence of a VH CDR1, a VH CDR2, and a VH CDR3, respectively, of a VH having an amino acid sequence of SEQ ID NO:643; and a VL comprising a VL CDR1, a VL CDR2, and a VL CDR3 having an amino acid sequence of a VL CDR1, a VL CDR2, and a VL CDR3, respectively, of a VL having an amino acid sequence of SEQ ID NO:644. In one embodiment, the TRGV9 antibody comprises: a VH comprising a VH CDR1, a VH CDR2, and a VH CDR3 having an amino acid sequence of a VH CDR1, a VH CDR2, and a VH CDR3, respectively, of a VH having an amino acid sequence of SEQ ID NO:677. In one embodiment, the TRGV9 antibody comprises: a VL comprising a VL CDR1, a VL CDR2, and a VL CDR3 having an amino acid sequence of a VL CDR1, a VL CDR2, and a VL CDR3, respectively, of a VL having an amino acid sequence of SEQ ID NO:678. In one embodiment, the TRGV9 antibody comprises: a VH comprising a VH CDR1, a VH CDR2, and a VH CDR3 having an amino acid sequence of a VH CDR1, a VH CDR2, and a VH CDR3, respectively, of a VH having an amino acid sequence of SEQ ID NO:677; and a VL comprising a VL CDR1, a VL CDR2, and a VL CDR3 having an amino acid sequence of a VL CDR1, a VL CDR2, and a VL CDR3, respectively, of a VL having an amino acid sequence of SEQ ID NO:678. In one embodiment, the TRGV9 antibody comprises: a VH comprising a VH CDR1, a VH CDR2, and a VH CDR3 having an amino acid sequence of a VH CDR1, a VH CDR2, and a VH CDR3, respectively, of a VH having an amino acid sequence of SEQ ID NO:711. In one embodiment, the TRGV9 antibody comprises: a VL comprising a VL CDR1, a VL CDR2, and a VL CDR3 having an amino acid sequence of a VL CDR1, a VL CDR2, and a VL CDR3, respectively, of a VL having an amino acid sequence of SEQ ID NO:712. In one embodiment, the TRGV9 antibody comprises: a VH comprising a VH CDR1, a VH CDR2, and a VH CDR3 having an amino acid sequence of a VH CDR1, a VH CDR2, and a VH CDR3, respectively, of a VH having an amino acid sequence of SEQ ID NO:711; and a VL comprising a VL CDR1, a VL CDR2, and a VL CDR3 having an amino acid sequence of a VL CDR1, a VL CDR2, and a VL CDR3, respectively, of a VL having an amino acid sequence of SEQ ID NO:712. In one embodiment, the TRGV9 antibody comprises: a VH comprising a VH CDR1, a VH CDR2, and a VH CDR3 having an amino acid sequence of a VH CDR1, a VH CDR2, and a VH CDR3, respectively, of a VH having an amino acid sequence of SEQ ID NO:745. In one embodiment, the TRGV9 antibody comprises: a VL comprising a VL CDR1, a VL CDR2, and a VL CDR3 having an amino acid sequence of a VL CDR1, a VL CDR2, and a VL CDR3, respectively, of a VL having an amino acid sequence of SEQ ID NO:746. In one embodiment, the TRGV9 antibody comprises: a VH comprising a VH CDR1, a VH CDR2, and a VH CDR3 having an amino acid sequence of a VH CDR1, a VH CDR2, and a VH CDR3, respectively, of a VH having an amino acid sequence of SEQ ID NO:745; and a VL comprising a VL CDR1, a VL CDR2, and a VL CDR3 having an amino acid sequence of a VL CDR1, a VL CDR2, and a VL CDR3, respectively, of a VL having an amino acid sequence of SEQ ID NO:746. In one embodiment, the TRGV9 antibody comprises: a VH comprising a VH CDR1, a VH CDR2, and a VH CDR3 having an amino acid sequence of a VH CDR1, a VH CDR2, and a VH CDR3, respectively, of a VH having an amino acid sequence of SEQ ID NO:779. In one embodiment, the TRGV9 antibody comprises: a VL comprising a VL CDR1, a VL CDR2, and a VL CDR3 having an amino acid sequence of a VL CDR1, a VL CDR2, and a VL CDR3, respectively, of a VL having an amino acid sequence of SEQ ID NO:780. In one embodiment, the TRGV9 antibody comprises: a VH comprising a VH CDR1, a VH CDR2, and a VH CDR3 having an amino acid sequence of a VH CDR1, a VH CDR2, and a VH CDR3, respectively, of a VH having an amino acid sequence of SEQ ID NO:779; and a VL comprising a VL CDR1, a VL CDR2, and a VL CDR3 having an amino acid sequence of a VL CDR1, a VL CDR2, and a VL CDR3, respectively, of a VL having an amino acid sequence of SEQ ID NO:780. In one embodiment, the TRGV9 antibody comprises: a VH comprising a VH CDR1, a VH CDR2, and a VH CDR3 having an amino acid sequence of a VH CDR1, a VH CDR2, and a VH CDR3, respectively, of a VH having an amino acid sequence of SEQ ID NO:813. In one embodiment, the TRGV9 antibody comprises: a VL comprising a VL CDR1, a VL CDR2, and a VL CDR3 having an amino acid sequence of a VL CDR1, a VL CDR2, and a VL CDR3, respectively, of a VL having an amino acid sequence of SEQ ID NO:814. In one embodiment, the TRGV9 antibody comprises: a VH comprising a VH CDR1, a VH CDR2, and a VH CDR3 having an amino acid sequence of a VH CDR1, a VH CDR2, and a VH CDR3, respectively, of a VH having an amino acid sequence of SEQ ID NO:813; and a VL comprising a VL CDR1, a VL CDR2, and a VL CDR3 having an amino acid sequence of a VL CDR1, a VL CDR2, and a VL CDR3, respectively, of a VL having an amino acid sequence of SEQ ID NO:814. In one embodiment, the TRGV9 antibody comprises: a VH comprising a VH CDR1, a VH CDR2, and a VH CDR3 having an amino acid sequence of a VH CDR1, a VH CDR2, and a VH CDR3, respectively, of a VH having an amino acid sequence of SEQ ID NO:847. In one embodiment, the TRGV9 antibody comprises: a VL comprising a VL CDR1, a VL CDR2, and a VL CDR3 having an amino acid sequence of a VL CDR1, a VL CDR2, and a VL CDR3, respectively, of a VL having an amino acid sequence of SEQ ID NO:848. In one embodiment, the TRGV9 antibody comprises: a VH comprising a VH CDR1, a VH CDR2, and a VH CDR3 having an amino acid sequence of a VH CDR1, a VH CDR2, and a VH CDR3, respectively, of a VH having an amino acid sequence of SEQ ID NO:847; and a VL comprising a VL CDR1, a VL CDR2, and a VL CDR3 having an amino acid sequence of a VL CDR1, a VL CDR2, and a VL CDR3, respectively, of a VL having an amino acid sequence of SEQ ID NO:848. In one embodiment, the TRGV9 antibody comprises: a VH comprising a VH CDR1, a VH CDR2, and a VH CDR3 having an amino acid sequence of a VH CDR1, a VH CDR2, and a VH CDR3, respectively, of a VH having an amino acid sequence of SEQ ID NO:881. In one embodiment, the TRGV9 antibody comprises: a VL comprising a VL CDR1, a VL CDR2, and a VL CDR3 having an amino acid sequence of a VL CDR1, a VL CDR2, and a VL CDR3, respectively, of a VL having an amino acid sequence of SEQ ID NO:882. In one embodiment, the TRGV9 antibody comprises: a VH comprising a VH CDR1, a VH CDR2, and a VH CDR3 having an amino acid sequence of a VH CDR1, a VH CDR2, and a VH CDR3, respectively, of a VH having an amino acid sequence of SEQ ID NO:881; and a VL comprising a VL CDR1, a VL CDR2, and a VL CDR3 having an amino acid sequence of a VL CDR1, a VL CDR2, and a VL CDR3, respectively, of a VL having an amino acid sequence of SEQ ID NO:882. In one embodiment, the TRGV9 antibody comprises: a VH comprising a VH CDR1, a VH CDR2, and a VH CDR3 having an amino acid sequence of a VH CDR1, a VH CDR2, and a VH CDR3, respectively, of a VH having an amino acid sequence of SEQ ID NO:915. In one embodiment, the TRGV9 antibody comprises: a VL comprising a VL CDR1, a VL CDR2, and a VL CDR3 having an amino acid sequence of a VL CDR1, a VL CDR2, and a VL CDR3, respectively, of a VL having an amino acid sequence of SEQ ID NO:916. In one embodiment, the TRGV9 antibody comprises: a VH comprising a VH CDR1, a VH CDR2, and a VH CDR3 having an amino acid sequence of a VH CDR1, a VH CDR2, and a VH CDR3, respectively, of a VH having an amino acid sequence of SEQ ID NO:915; and a VL comprising a VL CDR1, a VL CDR2, and a VL CDR3 having an amino acid sequence of a VL CDR1, a VL CDR2, and a VL CDR3, respectively, of a VL having an amino acid sequence of SEQ ID NO:916. In one embodiment, the TRGV9 antibody comprises: a VH comprising a VH CDR1, a VH CDR2, and a VH CDR3 having an amino acid sequence of a VH CDR1, a VH CDR2, and a VH CDR3, respectively, of a VH having an amino acid sequence of SEQ ID NO:949. In one embodiment, the TRGV9 antibody comprises: a VL comprising a VL CDR1, a VL CDR2, and a VL CDR3 having an amino acid sequence of a VL CDR1, a VL CDR2, and a VL CDR3, respectively, of a VL having an amino acid sequence of SEQ ID NO:950. In one embodiment, the TRGV9 antibody comprises: a VH comprising a VH CDR1, a VH CDR2, and a VH CDR3 having an amino acid sequence of a VH CDR1, a VH CDR2, and a VH CDR3, respectively, of a VH having an amino acid sequence of SEQ ID NO:949; and a VL comprising a VL CDR1, a VL CDR2, and a VL CDR3 having an amino acid sequence of a VL CDR1, a VL CDR2, and a VL CDR3, respectively, of a VL having an amino acid sequence of SEQ ID NO:950. In one embodiment, the TRGV9 antibody comprises: a VH comprising a VH CDR1, a VH CDR2, and a VH CDR3 having an amino acid sequence of a VH CDR1, a VH CDR2, and a VH CDR3, respectively, of a VH having an amino acid sequence of SEQ ID NO:983. In one embodiment, the TRGV9 antibody comprises: a VL comprising a VL CDR1, a VL CDR2, and a VL CDR3 having an amino acid sequence of a VL CDR1, a VL CDR2, and a VL CDR3, respectively, of a VL having an amino acid sequence of SEQ ID NO:984. In one embodiment, the TRGV9 antibody comprises: a VH comprising a VH CDR1, a VH CDR2, and a VH CDR3 having an amino acid sequence of a VH CDR1, a VH CDR2, and a VH CDR3, respectively, of a VH having an amino acid sequence of SEQ ID NO:983; and a VL comprising a VL CDR1, a VL CDR2, and a VL CDR3 having an amino acid sequence of a VL CDR1, a VL CDR2, and a VL CDR3, respectively, of a VL having an amino acid sequence of SEQ ID NO:984. In one embodiment, the TRGV9 antibody comprises: a VH comprising a VH CDR1, a VH CDR2, and a VH CDR3 having an amino acid sequence of a VH CDR1, a VH CDR2, and a VH CDR3, respectively, of a VH having an amino acid sequence of SEQ ID NO:1017. In one embodiment, the TRGV9 antibody comprises: a VL comprising a VL CDR1, a VL CDR2, and a VL CDR3 having an amino acid sequence of a VL CDR1, a VL CDR2, and a VL CDR3, respectively, of a VL having an amino acid sequence of SEQ ID NO:1018. In one embodiment, the TRGV9 antibody comprises: a VH comprising a VH CDR1, a VH CDR2, and a VH CDR3 having an amino acid sequence of a VH CDR1, a VH CDR2, and a VH CDR3, respectively, of a VH having an amino acid sequence of SEQ ID NO:1017; and a VL comprising a VL CDR1, a VL CDR2, and a VL CDR3 having an amino acid sequence of a VL CDR1, a VL CDR2, and a VL CDR3, respectively, of a VL having an amino acid sequence of SEQ ID NO:1018. In one embodiment, the TRGV9 antibody comprises: a VH comprising a VH CDR1, a VH CDR2, and a VH CDR3 having an amino acid sequence of a VH CDR1, a VH CDR2, and a VH CDR3, respectively, of a VH having an amino acid sequence of SEQ ID NO:1051. In one embodiment, the TRGV9 antibody comprises: a VL comprising a VL CDR1, a VL CDR2, and a VL CDR3 having an amino acid sequence of a VL CDR1, a VL CDR2, and a VL CDR3, respectively, of a VL having an amino acid sequence of SEQ ID NO:1052. In one embodiment, the TRGV9 antibody comprises: a VH comprising a VH CDR1, a VH CDR2, and a VH CDR3 having an amino acid sequence of a VH CDR1, a VH CDR2, and a VH CDR3, respectively, of a VH having an amino acid sequence of SEQ ID NO:1051; and a VL comprising a VL CDR1, a VL CDR2, and a VL CDR3 having an amino acid sequence of a VL CDR1, a VL CDR2, and a VL CDR3, respectively, of a VL having an amino acid sequence of SEQ ID NO:1052. In one embodiment, the TRGV9 antibody comprises: a VH comprising a VH CDR1, a VH CDR2, and a VH CDR3 having an amino acid sequence of a VH CDR1, a VH CDR2, and a VH CDR3, respectively, of a VH having an amino acid sequence of SEQ ID NO:1085. In one embodiment, the TRGV9 antibody comprises: a VL comprising a VL CDR1, a VL CDR2, and a VL CDR3 having an amino acid sequence of a VL CDR1, a VL CDR2, and a VL CDR3, respectively, of a VL having an amino acid sequence of SEQ ID NO:1086. In one embodiment, the TRGV9 antibody comprises: a VH comprising a VH CDR1, a VH CDR2, and a VH CDR3 having an amino acid sequence of a VH CDR1, a VH CDR2, and a VH CDR3, respectively, of a VH having an amino acid sequence of SEQ ID NO:1085; and a VL comprising a VL CDR1, a VL CDR2, and a VL CDR3 having an amino acid sequence of a VL CDR1, a VL CDR2, and a VL CDR3, respectively, of a VL having an amino acid sequence of SEQ ID NO:1086. In one embodiment, the TRGV9 antibody comprises: a VH comprising a VH CDR1, a VH CDR2, and a VH CDR3 having an amino acid sequence of a VH CDR1, a VH CDR2, and a VH CDR3, respectively, of a VH having an amino acid sequence of SEQ ID NO:1119. In one embodiment, the TRGV9 antibody comprises: a VL comprising a VL CDR1, a VL CDR2, and a VL CDR3 having an amino acid sequence of a VL CDR1, a VL CDR2, and a VL CDR3, respectively, of a VL having an amino acid sequence of SEQ ID NO:1120. In one embodiment, the TRGV9 antibody comprises: a VH comprising a VH CDR1, a VH CDR2, and a VH CDR3 having an amino acid sequence of a VH CDR1, a VH CDR2, and a VH CDR3, respectively, of a VH having an amino acid sequence of SEQ ID NO:1119; and a VL comprising a VL CDR1, a VL CDR2, and a VL CDR3 having an amino acid sequence of a VL CDR1, a VL CDR2, and a VL CDR3, respectively, of a VL having an amino acid sequence of SEQ ID NO:1120. In one embodiment, the TRGV9 antibody comprises: a VH comprising a VH CDR1, a VH CDR2, and a VH CDR3 having an amino acid sequence of a VH CDR1, a VH CDR2, and a VH CDR3, respectively, of a VH having an amino acid sequence of SEQ ID NO:1153. In one embodiment, the TRGV9 antibody comprises: a VL comprising a VL CDR1, a VL CDR2, and a VL CDR3 having an amino acid sequence of a VL CDR1, a VL CDR2, and a VL CDR3, respectively, of a VL having an amino acid sequence of SEQ ID NO:1154. In one embodiment, the TRGV9 antibody comprises: a VH comprising a VH CDR1, a VH CDR2, and a VH CDR3 having an amino acid sequence of a VH CDR1, a VH CDR2, and a VH CDR3, respectively, of a VH having an amino acid sequence of SEQ ID NO:1153; and a VL comprising a VL CDR1, a VL CDR2, and a VL CDR3 having an amino acid sequence of a VL CDR1, a VL CDR2, and a VL CDR3, respectively, of a VL having an amino acid sequence of SEQ ID NO:1154. In one embodiment, the TRGV9 antibody comprises: a VH comprising a VH CDR1, a VH CDR2, and a VH CDR3 having an amino acid sequence of a VH CDR1, a VH CDR2, and a VH CDR3, respectively, of a VH having an amino acid sequence of SEQ ID NO:1187. In one embodiment, the TRGV9 antibody comprises: a VL comprising a VL CDR1, a VL CDR2, and a VL CDR3 having an amino acid sequence of a VL CDR1, a VL CDR2, and a VL CDR3, respectively, of a VL having an amino acid sequence of SEQ ID NO:1188. In one embodiment, the TRGV9 antibody comprises: a VH comprising a VH CDR1, a VH CDR2, and a VH CDR3 having an amino acid sequence of a VH CDR1, a VH CDR2, and a VH CDR3, respectively, of a VH having an amino acid sequence of SEQ ID NO:1187; and a VL comprising a VL CDR1, a VL CDR2, and a VL CDR3 having an amino acid sequence of a VL CDR1, a VL CDR2, and a VL CDR3, respectively, of a VL having an amino acid sequence of SEQ ID NO:1188. In one embodiment, the TRGV9 antibody comprises: a VH comprising a VH CDR1, a VH CDR2, and a VH CDR3 having an amino acid sequence of a VH CDR1, a VH CDR2, and a VH CDR3, respectively, of a VH having an amino acid sequence of SEQ ID NO:1221. In one embodiment, the TRGV9 antibody comprises: a VL comprising a VL CDR1, a VL CDR2, and a VL CDR3 having an amino acid sequence of a VL CDR1, a VL CDR2, and a VL CDR3, respectively, of a VL having an amino acid sequence of SEQ ID NO:1222. In one embodiment, the TRGV9 antibody comprises: a VH comprising a VH CDR1, a VH CDR2, and a VH CDR3 having an amino acid sequence of a VH CDR1, a VH CDR2, and a VH CDR3, respectively, of a VH having an amino acid sequence of SEQ ID NO:1221; and a VL comprising a VL CDR1, a VL CDR2, and a VL CDR3 having an amino acid sequence of a VL CDR1, a VL CDR2, and a VL CDR3, respectively, of a VL having an amino acid sequence of SEQ ID NO:1222. In one embodiment, the TRGV9 antibody comprises: a VH comprising a VH CDR1, a VH CDR2, and a VH CDR3 having an amino acid sequence of a VH CDR1, a VH CDR2, and a VH CDR3, respectively, of a VH having an amino acid sequence of SEQ ID NO:1255. In one embodiment, the TRGV9 antibody comprises: a VL comprising a VL CDR1, a VL CDR2, and a VL CDR3 having an amino acid sequence of a VL CDR1, a VL CDR2, and a VL CDR3, respectively, of a VL having an amino acid sequence of SEQ ID NO:1256. In one embodiment, the TRGV9 antibody comprises: a VH comprising a VH CDR1, a VH CDR2, and a VH CDR3 having an amino acid sequence of a VH CDR1, a VH CDR2, and a VH CDR3, respectively, of a VH having an amino acid sequence of SEQ ID NO:1255; and a VL comprising a VL CDR1, a VL CDR2, and a VL CDR3 having an amino acid sequence of a VL CDR1, a VL CDR2, and a VL CDR3, respectively, of a VL having an amino acid sequence of SEQ ID NO:1256. In one embodiment, the TRGV9 antibody comprises: a VH comprising a VH CDR1, a VH CDR2, and a VH CDR3 having an amino acid sequence of a VH CDR1, a VH CDR2, and a VH CDR3, respectively, of a VH having an amino acid sequence of SEQ ID NO:1289. In one embodiment, the TRGV9 antibody comprises: a VL comprising a VL CDR1, a VL CDR2, and a VL CDR3 having an amino acid sequence of a VL CDR1, a VL CDR2, and a VL CDR3, respectively, of a VL having an amino acid sequence of SEQ ID NO:1290. In one embodiment, the TRGV9 antibody comprises: a VH comprising a VH CDR1, a VH CDR2, and a VH CDR3 having an amino acid sequence of a VH CDR1, a VH CDR2, and a VH CDR3, respectively, of a VH having an amino acid sequence of SEQ ID NO:1289; and a VL comprising a VL CDR1, a VL CDR2, and a VL CDR3 having an amino acid sequence of a VL CDR1, a VL CDR2, and a VL CDR3, respectively, of a VL having an amino acid sequence of SEQ ID NO:1290. In one embodiment, the TRGV9 antibody comprises: a VH comprising a VH CDR1, a VH CDR2, and a VH CDR3 having an amino acid sequence of a VH CDR1, a VH CDR2, and a VH CDR3, respectively, of a VH having an amino acid sequence of SEQ ID NO:1323. In one embodiment, the TRGV9 antibody comprises: a VL comprising a VL CDR1, a VL CDR2, and a VL CDR3 having an amino acid sequence of a VL CDR1, a VL CDR2, and a VL CDR3, respectively, of a VL having an amino acid sequence of SEQ ID NO:1324. In one embodiment, the TRGV9 antibody comprises: a VH comprising a VH CDR1, a VH CDR2, and a VH CDR3 having an amino acid sequence of a VH CDR1, a VH CDR2, and a VH CDR3, respectively, of a VH having an amino acid sequence of SEQ ID NO:1323; and a VL comprising a VL CDR1, a VL CDR2, and a VL CDR3 having an amino acid sequence of a VL CDR1, a VL CDR2, and a VL CDR3, respectively, of a VL having an amino acid sequence of SEQ ID NO:1324. In one embodiment, the TRGV9 antibody comprises: a VH comprising a VH CDR1, a VH CDR2, and a VH CDR3 having an amino acid sequence of a VH CDR1, a VH CDR2, and a VH CDR3, respectively, of a VH having an amino acid sequence of SEQ ID NO:1357. In one embodiment, the TRGV9 antibody comprises: a VL comprising a VL CDR1, a VL CDR2, and a VL CDR3 having an amino acid sequence of a VL CDR1, a VL CDR2, and a VL CDR3, respectively, of a VL having an amino acid sequence of SEQ ID NO:1358. In one embodiment, the TRGV9 antibody comprises: a VH comprising a VH CDR1, a VH CDR2, and a VH CDR3 having an amino acid sequence of a VH CDR1, a VH CDR2, and a VH CDR3, respectively, of a VH having an amino acid sequence of SEQ ID NO:1357; and a VL comprising a VL CDR1, a VL CDR2, and a VL CDR3 having an amino acid sequence of a VL CDR1, a VL CDR2, and a VL CDR3, respectively, of a VL having an amino acid sequence of SEQ ID NO:1358. In one embodiment, the TRGV9 antibody comprises: a VH comprising a VH CDR1, a VH CDR2, and a VH CDR3 having an amino acid sequence of a VH CDR1, a VH CDR2, and a VH CDR3, respectively, of a VH having an amino acid sequence of SEQ ID NO:1391. In one embodiment, the TRGV9 antibody comprises: a VL comprising a VL CDR1, a VL CDR2, and a VL CDR3 having an amino acid sequence of a VL CDR1, a VL CDR2, and a VL CDR3, respectively, of a VL having an amino acid sequence of SEQ ID NO:1392. In one embodiment, the TRGV9 antibody comprises: a VH comprising a VH CDR1, a VH CDR2, and a VH CDR3 having an amino acid sequence of a VH CDR1, a VH CDR2, and a VH CDR3, respectively, of a VH having an amino acid sequence of SEQ ID NO:1391; and a VL comprising a VL CDR1, a VL CDR2, and a VL CDR3 having an amino acid sequence of a VL CDR1, a VL CDR2, and a VL CDR3, respectively, of a VL having an amino acid sequence of SEQ ID NO:1392. In one embodiment, the TRGV9 antibody comprises: a VH comprising a VH CDR1, a VH CDR2, and a VH CDR3 having an amino acid sequence of a VH CDR1, a VH CDR2, and a VH CDR3, respectively, of a VH having an amino acid sequence of SEQ ID NO:1425. In one embodiment, the TRGV9 antibody comprises: a VL comprising a VL CDR1, a VL CDR2, and a VL CDR3 having an amino acid sequence of a VL CDR1, a VL CDR2, and a VL CDR3, respectively, of a VL having an amino acid sequence of SEQ ID NO:1426. In one embodiment, the TRGV9 antibody comprises: a VH comprising a VH CDR1, a VH CDR2, and a VH CDR3 having an amino acid sequence of a VH CDR1, a VH CDR2, and a VH CDR3, respectively, of a VH having an amino acid sequence of SEQ ID NO:1425; and a VL comprising a VL CDR1, a VL CDR2, and a VL CDR3 having an amino acid sequence of a VL CDR1, a VL CDR2, and a VL CDR3, respectively, of a VL having an amino acid sequence of SEQ ID NO:1426. In one embodiment, the TRGV9 antibody comprises: a VH comprising a VH CDR1, a VH CDR2, and a VH CDR3 having an amino acid sequence of a VH CDR1, a VH CDR2, and a VH CDR3, respectively, of a VH having an amino acid sequence of SEQ ID NO:1459. In one embodiment, the TRGV9 antibody comprises: a VL comprising a VL CDR1, a VL CDR2, and a VL CDR3 having an amino acid sequence of a VL CDR1, a VL CDR2, and a VL CDR3, respectively, of a VL having an amino acid sequence of SEQ ID NO:1460. In one embodiment, the TRGV9 antibody comprises: a VH comprising a VH CDR1, a VH CDR2, and a VH CDR3 having an amino acid sequence of a VH CDR1, a VH CDR2, and a VH CDR3, respectively, of a VH having an amino acid sequence of SEQ ID NO:1459; and a VL comprising a VL CDR1, a VL CDR2, and a VL CDR3 having an amino acid sequence of a VL CDR1, a VL CDR2, and a VL CDR3, respectively, of a VL having an amino acid sequence of SEQ ID NO:1460. In one embodiment, the TRGV9 antibody comprises: a VH comprising a VH CDR1, a VH CDR2, and a VH CDR3 having an amino acid sequence of a VH CDR1, a VH CDR2, and a VH CDR3, respectively, of a VH having an amino acid sequence of SEQ ID NO:1493. In one embodiment, the TRGV9 antibody comprises: a VL comprising a VL CDR1, a VL CDR2, and a VL CDR3 having an amino acid sequence of a VL CDR1, a VL CDR2, and a VL CDR3, respectively, of a VL having an amino acid sequence of SEQ ID NO:1494. In one embodiment, the TRGV9 antibody comprises: a VH comprising a VH CDR1, a VH CDR2, and a VH CDR3 having an amino acid sequence of a VH CDR1, a VH CDR2, and a VH CDR3, respectively, of a VH having an amino acid sequence of SEQ ID NO:1493; and a VL comprising a VL CDR1, a VL CDR2, and a VL CDR3 having an amino acid sequence of a VL CDR1, a VL CDR2, and a VL CDR3, respectively, of a VL having an amino acid sequence of SEQ ID NO:1494. In one embodiment, the TRGV9 antibody comprises: a VH comprising a VH CDR1, a VH CDR2, and a VH CDR3 having an amino acid sequence of a VH CDR1, a VH CDR2, and a VH CDR3, respectively, of a VH having an amino acid sequence of SEQ ID NO:1527. In one embodiment, the TRGV9 antibody comprises: a VL comprising a VL CDR1, a VL CDR2, and a VL CDR3 having an amino acid sequence of a VL CDR1, a VL CDR2, and a VL CDR3, respectively, of a VL having an amino acid sequence of SEQ ID NO:1528. In one embodiment, the TRGV9 antibody comprises: a VH comprising a VH CDR1, a VH CDR2, and a VH CDR3 having an amino acid sequence of a VH CDR1, a VH CDR2, and a VH CDR3, respectively, of a VH having an amino acid sequence of SEQ ID NO:1527; and a VL comprising a VL CDR1, a VL CDR2, and a VL CDR3 having an amino acid sequence of a VL CDR1, a VL CDR2, and a VL CDR3, respectively, of a VL having an amino acid sequence of SEQ ID NO:1528. In one embodiment, the TRGV9 antibody comprises: a VH comprising a VH CDR1, a VH CDR2, and a VH CDR3 having an amino acid sequence of a VH CDR1, a VH CDR2, and a VH CDR3, respectively, of a VH having an amino acid sequence of SEQ ID NO:1561. In one embodiment, the TRGV9 antibody comprises: a VL comprising a VL CDR1, a VL CDR2, and a VL CDR3 having an amino acid sequence of a VL CDR1, a VL CDR2, and a VL CDR3, respectively, of a VL having an amino acid sequence of SEQ ID NO:1562. In one embodiment, the TRGV9 antibody comprises: a VH comprising a VH CDR1, a VH CDR2, and a VH CDR3 having an amino acid sequence of a VH CDR1, a VH CDR2, and a VH CDR3, respectively, of a VH having an amino acid sequence of SEQ ID NO:1561; and a VL comprising a VL CDR1, a VL CDR2, and a VL CDR3 having an amino acid sequence of a VL CDR1, a VL CDR2, and a VL CDR3, respectively, of a VL having an amino acid sequence of SEQ ID NO:1562. In one embodiment, the TRGV9 antibody comprises: a VH comprising a VH CDR1, a VH CDR2, and a VH CDR3 having an amino acid sequence of a VH CDR1, a VH CDR2, and a VH CDR3, respectively, of a VH having an amino acid sequence of SEQ ID NO:1595. In one embodiment, the TRGV9 antibody comprises: a VL comprising a VL CDR1, a VL CDR2, and a VL CDR3 having an amino acid sequence of a VL CDR1, a VL CDR2, and a VL CDR3, respectively, of a VL having an amino acid sequence of SEQ ID NO:1596. In one embodiment, the TRGV9 antibody comprises: a VH comprising a VH CDR1, a VH CDR2, and a VH CDR3 having an amino acid sequence of a VH CDR1, a VH CDR2, and a VH CDR3, respectively, of a VH having an amino acid sequence of SEQ ID NO:1595; and a VL comprising a VL CDR1, a VL CDR2, and a VL CDR3 having an amino acid sequence of a VL CDR1, a VL CDR2, and a VL CDR3, respectively, of a VL having an amino acid sequence of SEQ ID NO:1596. In one embodiment, the TRGV9 antibody comprises: a VH comprising a VH CDR1, a VH CDR2, and a VH CDR3 having an amino acid sequence of a VH CDR1, a VH CDR2, and a VH CDR3, respectively, of a VH having an amino acid sequence of SEQ ID NO:1629. In one embodiment, the TRGV9 antibody comprises: a VL comprising a VL CDR1, a VL CDR2, and a VL CDR3 having an amino acid sequence of a VL CDR1, a VL CDR2, and a VL CDR3, respectively, of a VL having an amino acid sequence of SEQ ID NO:1630. In one embodiment, the TRGV9 antibody comprises: a VH comprising a VH CDR1, a VH CDR2, and a VH CDR3 having an amino acid sequence of a VH CDR1, a VH CDR2, and a VH CDR3, respectively, of a VH having an amino acid sequence of SEQ ID NO:1629; and a VL comprising a VL CDR1, a VL CDR2, and a VL CDR3 having an amino acid sequence of a VL CDR1, a VL CDR2, and a VL CDR3, respectively, of a VL having an amino acid sequence of SEQ ID NO:1630. In one embodiment, the TRGV9 antibody comprises: a VH comprising a VH CDR1, a VH CDR2, and a VH CDR3 having an amino acid sequence of a VH CDR1, a VH CDR2, and a VH CDR3, respectively, of a VH having an amino acid sequence of SEQ ID NO:1663. In one embodiment, the TRGV9 antibody comprises: a VL comprising a VL CDR1, a VL CDR2, and a VL CDR3 having an amino acid sequence of a VL CDR1, a VL CDR2, and a VL CDR3, respectively, of a VL having an amino acid sequence of SEQ ID NO:1664. In one embodiment, the TRGV9 antibody comprises: a VH comprising a VH CDR1, a VH CDR2, and a VH CDR3 having an amino acid sequence of a VH CDR1, a VH CDR2, and a VH CDR3, respectively, of a VH having an amino acid sequence of SEQ ID NO:1663; and a VL comprising a VL CDR1, a VL CDR2, and a VL CDR3 having an amino acid sequence of a VL CDR1, a VL CDR2, and a VL CDR3, respectively, of a VL having an amino acid sequence of SEQ ID NO:1664. In one embodiment, the TRGV9 antibody comprises: a VH comprising a VH CDR1, a VH CDR2, and a VH CDR3 having an amino acid sequence of a VH CDR1, a VH CDR2, and a VH CDR3, respectively, of a VH having an amino acid sequence of SEQ ID NO:1697. In one embodiment, the TRGV9 antibody comprises: a VL comprising a VL CDR1, a VL CDR2, and a VL CDR3 having an amino acid sequence of a VL CDR1, a VL CDR2, and a VL CDR3, respectively, of a VL having an amino acid sequence of SEQ ID NO:1698. In one embodiment, the TRGV9 antibody comprises: a VH comprising a VH CDR1, a VH CDR2, and a VH CDR3 having an amino acid sequence of a VH CDR1, a VH CDR2, and a VH CDR3, respectively, of a VH having an amino acid sequence of SEQ ID NO:1697; and a VL comprising a VL CDR1, a VL CDR2, and a VL CDR3 having an amino acid sequence of a VL CDR1, a VL CDR2, and a VL CDR3, respectively, of a VL having an amino acid sequence of SEQ ID NO:1698. In one embodiment, the TRGV9 antibody comprises: a VH comprising a VH CDR1, a VH CDR2, and a VH CDR3 having an amino acid sequence of a VH CDR1, a VH CDR2, and a VH CDR3, respectively, of a VH having an amino acid sequence of SEQ ID NO:1731. In one embodiment, the TRGV9 antibody comprises: a VL comprising a VL CDR1, a VL CDR2, and a VL CDR3 having an amino acid sequence of a VL CDR1, a VL CDR2, and a VL CDR3, respectively, of a VL having an amino acid sequence of SEQ ID NO:1732. In one embodiment, the TRGV9 antibody comprises: a VH comprising a VH CDR1, a VH CDR2, and a VH CDR3 having an amino acid sequence of a VH CDR1, a VH CDR2, and a VH CDR3, respectively, of a VH having an amino acid sequence of SEQ ID NO:1731; and a VL comprising a VL CDR1, a VL CDR2, and a VL CDR3 having an amino acid sequence of a VL CDR1, a VL CDR2, and a VL CDR3, respectively, of a VL having an amino acid sequence of SEQ ID NO:1732. In one embodiment, the TRGV9 antibody comprises: a VH comprising a VH CDR1, a VH CDR2, and a VH CDR3 having an amino acid sequence of a VH CDR1, a VH CDR2, and a VH CDR3, respectively, of a VH having an amino acid sequence of SEQ ID NO:1765. In one embodiment, the TRGV9 antibody comprises: a VL comprising a VL CDR1, a VL CDR2, and a VL CDR3 having an amino acid sequence of a VL CDR1, a VL CDR2, and a VL CDR3, respectively, of a VL having an amino acid sequence of SEQ ID NO:1766. In one embodiment, the TRGV9 antibody comprises: a VH comprising a VH CDR1, a VH CDR2, and a VH CDR3 having an amino acid sequence of a VH CDR1, a VH CDR2, and a VH CDR3, respectively, of a VH having an amino acid sequence of SEQ ID NO:1765; and a VL comprising a VL CDR1, a VL CDR2, and a VL CDR3 having an amino acid sequence of a VL CDR1, a VL CDR2, and a VL CDR3, respectively, of a VL having an amino acid sequence of SEQ ID NO:1766. In one embodiment, the TRGV9 antibody comprises: a VH comprising a VH CDR1, a VH CDR2, and a VH CDR3 having an amino acid sequence of a VH CDR1, a VH CDR2, and a VH CDR3, respectively, of a VH having an amino acid sequence of SEQ ID NO:1799. In one embodiment, the TRGV9 antibody comprises: a VL comprising a VL CDR1, a VL CDR2, and a VL CDR3 having an amino acid sequence of a VL CDR1, a VL CDR2, and a VL CDR3, respectively, of a VL having an amino acid sequence of SEQ ID NO:1800. In one embodiment, the TRGV9 antibody comprises: a VH comprising a VH CDR1, a VH CDR2, and a VH CDR3 having an amino acid sequence of a VH CDR1, a VH CDR2, and a VH CDR3, respectively, of a VH having an amino acid sequence of SEQ ID NO:1799; and a VL comprising a VL CDR1, a VL CDR2, and a VL CDR3 having an amino acid sequence of a VL CDR1, a VL CDR2, and a VL CDR3, respectively, of a VL having an amino acid sequence of SEQ ID NO:1800. In one embodiment, the TRGV9 antibody comprises: a VH comprising a VH CDR1, a VH CDR2, and a VH CDR3 having an amino acid sequence of a VH CDR1, a VH CDR2, and a VH CDR3, respectively, of a VH having an amino acid sequence of SEQ ID NO:1833. In one embodiment, the TRGV9 antibody comprises: a VL comprising a VL CDR1, a VL CDR2, and a VL CDR3 having an amino acid sequence of a VL CDR1, a VL CDR2, and a VL CDR3, respectively, of a VL having an amino acid sequence of SEQ ID NO:1834. In one embodiment, the TRGV9 antibody comprises: a VH comprising a VH CDR1, a VH CDR2, and a VH CDR3 having an amino acid sequence of a VH CDR1, a VH CDR2, and a VH CDR3, respectively, of a VH having an amino acid sequence of SEQ ID NO:1833; and a VL comprising a VL CDR1, a VL CDR2, and a VL CDR3 having an amino acid sequence of a VL CDR1, a VL CDR2, and a VL CDR3, respectively, of a VL having an amino acid sequence of SEQ ID NO:1834. In one embodiment, the TRGV9 antibody comprises: a VH comprising a VH CDR1, a VH CDR2, and a VH CDR3 having an amino acid sequence of a VH CDR1, a VH CDR2, and a VH CDR3, respectively, of a VH having an amino acid sequence of SEQ ID NO:1867. In one embodiment, the TRGV9 antibody comprises: a VL comprising a VL CDR1, a VL CDR2, and a VL CDR3 having an amino acid sequence of a VL CDR1, a VL CDR2, and a VL CDR3, respectively, of a VL having an amino acid sequence of SEQ ID NO:1868. In one embodiment, the TRGV9 antibody comprises: a VH comprising a VH CDR1, a VH CDR2, and a VH CDR3 having an amino acid sequence of a VH CDR1, a VH CDR2, and a VH CDR3, respectively, of a VH having an amino acid sequence of SEQ ID NO:1867; and a VL comprising a VL CDR1, a VL CDR2, and a VL CDR3 having an amino acid sequence of a VL CDR1, a VL CDR2, and a VL CDR3, respectively, of a VL having an amino acid sequence of SEQ ID NO:1868. In one embodiment, the TRGV9 antibody comprises: a VH comprising a VH CDR1, a VH CDR2, and a VH CDR3 having an amino acid sequence of a VH CDR1, a VH CDR2, and a VH CDR3, respectively, of a VH having an amino acid sequence of SEQ ID NO:1901. In one embodiment, the TRGV9 antibody comprises: a VL comprising a VL CDR1, a VL CDR2, and a VL CDR3 having an amino acid sequence of a VL CDR1, a VL CDR2, and a VL CDR3, respectively, of a VL having an amino acid sequence of SEQ ID NO:1902. In one embodiment, the TRGV9 antibody comprises: a VH comprising a VH CDR1, a VH CDR2, and a VH CDR3 having an amino acid sequence of a VH CDR1, a VH CDR2, and a VH CDR3, respectively, of a VH having an amino acid sequence of SEQ ID NO:1901; and a VL comprising a VL CDR1, a VL CDR2, and a VL CDR3 having an amino acid sequence of a VL CDR1, a VL CDR2, and a VL CDR3, respectively, of a VL having an amino acid sequence of SEQ ID NO:1902. In one embodiment, the TRGV9 antibody comprises: a VH comprising a VH CDR1, a VH CDR2, and a VH CDR3 having an amino acid sequence of a VH CDR1, a VH CDR2, and a VH CDR3, respectively, of a VH having an amino acid sequence of SEQ ID NO:1935. In one embodiment, the TRGV9 antibody comprises: a VL comprising a VL CDR1, a VL CDR2, and a VL CDR3 having an amino acid sequence of a VL CDR1, a VL CDR2, and a VL CDR3, respectively, of a VL having an amino acid sequence of SEQ ID NO:1936. In one embodiment, the TRGV9 antibody comprises: a VH comprising a VH CDR1, a VH CDR2, and a VH CDR3 having an amino acid sequence of a VH CDR1, a VH CDR2, and a VH CDR3, respectively, of a VH having an amino acid sequence of SEQ ID NO:1935; and a VL comprising a VL CDR1, a VL CDR2, and a VL CDR3 having an amino acid sequence of a VL CDR1, a VL CDR2, and a VL CDR3, respectively, of a VL having an amino acid sequence of SEQ ID NO:1936. In one embodiment, the TRGV9 antibody comprises: a VH comprising a VH CDR1, a VH CDR2, and a VH CDR3 having an amino acid sequence of a VH CDR1, a VH CDR2, and a VH CDR3, respectively, of a VH having an amino acid sequence of SEQ ID NO:1969. In one embodiment, the TRGV9 antibody comprises: a VL comprising a VL CDR1, a VL CDR2, and a VL CDR3 having an amino acid sequence of a VL CDR1, a VL CDR2, and a VL CDR3, respectively, of a VL having an amino acid sequence of SEQ ID NO:1970. In one embodiment, the TRGV9 antibody comprises: a VH comprising a VH CDR1, a VH CDR2, and a VH CDR3 having an amino acid sequence of a VH CDR1, a VH CDR2, and a VH CDR3, respectively, of a VH having an amino acid sequence of SEQ ID NO:1969; and a VL comprising a VL CDR1, a VL CDR2, and a VL CDR3 having an amino acid sequence of a VL CDR1, a VL CDR2, and a VL CDR3, respectively, of a VL having an amino acid sequence of SEQ ID NO:1970. In one embodiment, the TRGV9 antibody comprises: a VH comprising a VH CDR1, a VH CDR2, and a VH CDR3 having an amino acid sequence of a VH CDR1, a VH CDR2, and a VH CDR3, respectively, of a VH having an amino acid sequence of SEQ ID NO:2003. In one embodiment, the TRGV9 antibody comprises: a VL comprising a VL CDR1, a VL CDR2, and a VL CDR3 having an amino acid sequence of a VL CDR1, a VL CDR2, and a VL CDR3, respectively, of a VL having an amino acid sequence of SEQ ID NO:2004. In one embodiment, the TRGV9 antibody comprises: a VH comprising a VH CDR1, a VH CDR2, and a VH CDR3 having an amino acid sequence of a VH CDR1, a VH CDR2, and a VH CDR3, respectively, of a VH having an amino acid sequence of SEQ ID NO:2003; and a VL comprising a VL CDR1, a VL CDR2, and a VL CDR3 having an amino acid sequence of a VL CDR1, a VL CDR2, and a VL CDR3, respectively, of a VL having an amino acid sequence of SEQ ID NO:2004. In some embodiments, the TRGV9 antibody is a multispecific antibody. In some embodiments, the TRGV9 antibody is a bispecific antibody. In some embodiments, the TRGV9 antibody is a trispecific antibody. In some embodiments, the TRGV9 antibody is a quadraspecific antibody.

[0159] In one aspect, provided herein is an antibody that binds TRGV9, comprising a VH CDR1 having an amino acid sequence of SEQ ID NO:25, wherein the third amino acid is A or T; a VH CDR2 having an amino acid sequence of SEQ ID NO:26, wherein the second amino acid is G or S, the fourth amino acid is S or T, the sixth amino acid is D or S; and a VH CDR3 having an amino acid sequence of SEQ ID NO:27, wherein the first amino acid is A, G, or V, the second amino acid is K, R, or T, the fourth amino acid is D, H, or G, the fifth amino acid is D, E, or V, the sixth amino acid is F, L, or Y, the eighth amino acid is A, G, P, or V, the ninth amino acid is F or L, the third amino acid is I of V. In one aspect, provided herein is an antibody that binds TRGV9, comprising a VL CDR1 having an amino acid sequence of SEQ ID NO:28, wherein the third amino acid is I or V, the fourth amino acid is R or S; a VL CDR2 having an amino acid sequence of SEQ ID NO:29, wherein the first amino acid is A, P or S; and a VL CDR3 having an amino acid sequence of SEQ ID NO:30, wherein the third amino acid is F or Y. In one aspect, provided herein is an antibody that binds TRGV9, comprising a VH CDR1 having an amino acid sequence of SEQ ID NO:25, wherein the third amino acid is A or T; a VH CDR2 having an amino acid sequence of SEQ ID NO:26, wherein the second amino acid is G or S, the fourth amino acid is S or T, the sixth amino acid is D or S; and a VH CDR3 having an amino acid sequence of SEQ ID NO:27, wherein the first amino acid is A, G, or V, the second amino acid is K, R, or T, the fourth amino acid is D, H, or G, the fifth amino acid is D, E, or V, the sixth amino acid is F, L, or Y, the eighth amino acid is A, G, P, or V, the ninth amino acid is F or L, the third amino acid is I of V; a VL CDR1 having an amino acid sequence of SEQ ID NO:28, wherein the third amino acid is I or V, the fourth amino acid is R or S; a VL CDR2 having an amino acid sequence of SEQ ID NO:29, wherein the first amino acid is A, P or S; and a VL CDR3 having an amino acid sequence of SEQ ID NO:30, wherein the third amino acid is F or Y.

[0160] In one aspect, provided herein is an antibody that binds TRGV9, comprising a VH CDR1 having an amino acid sequence of SEQ ID NO:93; a VH CDR2 having an amino acid sequence of SEQ ID NO:94; a VH CDR3 having an amino acid sequence of SEQ ID NO:95. In one aspect, provided herein is an antibody that binds TRGV9, comprising a VL CDR1 having an amino acid sequence of SEQ ID NO:96; a VL CDR2 having an amino acid sequence of SEQ ID NO:97; and a VL CDR3 having an amino acid sequence of SEQ ID NO:98, wherein the third amino acid is A or Y, the fourth is N or S, the sixth is F or W, and the eighth is R or W. In one aspect, provided herein is an antibody that binds TRGV9, comprising a VH CDR1 having an amino acid sequence of SEQ ID NO:93; a VH CDR2 having an amino acid sequence of SEQ ID NO:94; a VH CDR3 having an amino acid sequence of SEQ ID NO:95; a VL CDR1 having an amino acid sequence of SEQ ID NO:96; a VL CDR2 having an amino acid sequence of SEQ ID NO:97; and a VL CDR3 having an amino acid sequence of SEQ ID NO:98, wherein the third amino acid is A or Y, the fourth is N or S, the sixth is F or W, and the eighth is R or W.

[0161] In one aspect, provided herein is an antibody that binds TRGV9, comprising a VH CDR1 having an amino acid sequence of SEQ ID NO:127, wherein the first amino acid if G or R, the fourth amino acid is F or L, the fifth amino acid if R or S; a VH CDR2 having an amino acid sequence of SEQ ID NO:128, wherein the second amino acid is S or T, the third amino acid is S or T, the fourth amino acid is S or T, the sixth amino acid is G, S, or Y; a VH CDR3 having an amino acid sequence of SEQ ID NO:129, wherein the fourth amino acid is L or R, the sixth amino acid if I or V, the seventh amino acid A, G, or R, the eighth amino acid is G or B, the ninth amino acid is A, T, or V, the tenth amino acid is D or G, the eleventh amino acid is D or Y, the sixteenth amino acid is L or M. In one aspect, provided herein is an antibody that binds TRGV9, comprising a VL CDR1 having an amino acid sequence of SEQ ID NO:130; a VL CDR2 having an amino acid sequence of SEQ ID NO:131; and a VL CDR3 having an amino acid sequence of SEQ ID NO:132. In one aspect, provided herein is an antibody that binds TRGV9, comprising a VH CDR1 having an amino acid sequence of SEQ ID NO:127, wherein the first amino acid if G or R, the fourth amino acid is F or L, the fifth amino acid if R or S; a VH CDR2 having an amino acid sequence of SEQ ID NO:128, wherein the second amino acid is S or T, the third amino acid is S or T, the fourth amino acid is S or T, the sixth amino acid is G, S, or Y; a VH CDR3 having an amino acid sequence of SEQ ID NO:129, wherein the fourth amino acid is L or R, the sixth amino acid if I or V, the seventh amino acid A, G, or R, the eighth amino acid is G or B, the ninth amino acid is A, T, or V, the tenth amino acid is D or G, the eleventh amino acid is D or Y, the sixteenth amino acid is L or M; a VL CDR1 having an amino acid sequence of SEQ ID NO:130; a VL CDR2 having an amino acid sequence of SEQ ID NO:131; and a VL CDR3 having an amino acid sequence of SEQ ID NO:132.

[0162] In one aspect, provided herein is an antibody that binds TRGV9, comprising a VH CDR1 having an amino acid sequence of SEQ ID NO:297, wherein the fifth amino acid is N or S, the sixth amino acid is N or S; a VH CDR2 having an amino acid sequence of SEQ ID NO:298; a VH CDR3 having an amino acid sequence of SEQ ID NO:299, wherein the fourth amino acid is R or V, the sixth amino acid is I or V, the seventh amino acid is G or T, the eighth amino acid is G or T, the twelfth amino acid is S or Y, the fourteenth amino acid is A or G. In one aspect, provided herein is an antibody that binds TRGV9, comprising a VL CDR1 having an amino acid sequence of SEQ ID NO:300, wherein the fourth amino acid is A or S; a VL CDR2 having an amino acid sequence of SEQ ID NO:301 and a VL CDR3 having an amino acid sequence of SEQ ID NO:302. In one aspect, provided herein is an antibody that binds TRGV9, comprising a VH CDR1 having an amino acid sequence of SEQ ID NO:297, wherein the fifth amino acid is N or S, the sixth amino acid is N or S; a VH CDR2 having an amino acid sequence of SEQ ID NO:298; a VH CDR3 having an amino acid sequence of SEQ ID NO:299, wherein the fourth amino acid is R or V, the sixth amino acid is I or V, the seventh amino acid is G or T, the eighth amino acid is G or T, the twelfth amino acid is S or Y, the fourteenth amino acid is A or G; a VL CDR1 having an amino acid sequence of SEQ ID NO:300, wherein the fourth amino acid is A or S; a VL CDR2 having an amino acid sequence of SEQ ID NO:301 and a VL CDR3 having an amino acid sequence of SEQ ID NO:302.

[0163] In one aspect, provided herein is an antibody that binds TRGV9, comprising a VH CDR1 having an amino acid sequence of SEQ ID NO:569; a VH CDR2 having an amino acid sequence of SEQ ID NO:570; a VH CDR3 having an amino acid sequence of SEQ ID NO:571. In one aspect, provided herein is an antibody that binds TRGV9, comprising a VL CDR1 having an amino acid sequence of SEQ ID NO:572, wherein the second amino acid is G or N, the third amino acid is I or V, the fourth amino acid is A or S, the fifth amino acid is S or there is no amino acid added to the fifth position and sequence continues to the sixth position; a VL CDR2 having an amino acid sequence of SEQ ID NO:573, wherein the first amino acid is A or G, the third amino acid is C or S; and a VL CDR3 having an amino acid sequence of SEQ ID NO:574, wherein the second amino acid is K or Q, the fourth amino acid is G or N, the sixth amino acid is A or S, the ninth amino acid is Y or W. In one aspect, provided herein is an antibody that binds TRGV9, comprising a VH CDR1 having an amino acid sequence of SEQ ID NO:569; a VH CDR2 having an amino acid sequence of SEQ ID NO:570; a VH CDR3 having an amino acid sequence of SEQ ID NO:571; a VL CDR1 having an amino acid sequence of SEQ ID NO:572, wherein the second amino acid is G or N, the third amino acid is I or V, the fourth amino acid is A or S, the fifth amino acid is S or there is no amino acid added to the fifth position and sequence continues to the sixth position; a VL CDR2 having an amino acid sequence of SEQ ID NO:573, wherein the first amino acid is A or G, the third amino acid is C or S; and a VL CDR3 having an amino acid sequence of SEQ ID NO:574, wherein the second amino acid is K or Q, the fourth amino acid is G or N, the sixth amino acid is A or S, the ninth amino acid is Y or W.

[0164] In one aspect, provided herein is an antibody that binds TRGV9, comprising a VH CDR1 having an amino acid sequence of SEQ ID NO:739; a VH CDR2 having an amino acid sequence of SEQ ID NO:740; a VH CDR3 having an amino acid sequence of SEQ ID NO:741, wherein the third amino acid is D or E, the fourth amino acid is I or L, the sixth amino acid I or V, the eleventh amino acid is M or Y, the twelfth amino acid is D or Y, the thirteenth amino acid is Q or Y, the fourteenth amino acid is D or Y. In one aspect, provided herein is an antibody that binds TRGV9, comprising a VL CDR1 having an amino acid sequence of SEQ ID NO:742, wherein the third amino acid is F or V, the sixth amino acid is N or S; a VL CDR2 having an amino acid sequence of SEQ ID NO:743; and a VL CDR3 having an amino acid sequence of SEQ ID NO:744. In one aspect, provided herein is an antibody that binds TRGV9, comprising a VH CDR1 having an amino acid sequence of SEQ ID NO:739; a VH CDR2 having an amino acid sequence of SEQ ID NO:740; a VH CDR3 having an amino acid sequence of SEQ ID NO:741, wherein the third amino acid is D or E, the fourth amino acid is I or L, the sixth amino acid I or V, the eleventh amino acid is M or Y, the twelfth amino acid is D or Y, the thirteenth amino acid is Q or Y, the fourteenth amino acid is D or Y; a VL CDR1 having an amino acid sequence of SEQ ID NO:742, wherein the third amino acid is F or V, the sixth amino acid is N or S; a VL CDR2 having an amino acid sequence of SEQ ID NO:743; and a VL CDR3 having an amino acid sequence of SEQ ID NO:744.

[0165] In one aspect, provided herein is an antibody that binds TRGV9, comprising a VH CDR1 having an amino acid sequence of SEQ ID NO:1181, wherein the fifth amino acid is G or S, the sixth amino acid is A or S; a VH CDR2 having an amino acid sequence of SEQ ID NO:1182, wherein the third amino acid is S or T; a VH CDR3 having an amino acid sequence of SEQ ID NO:1183, wherein the sixth amino acid is I or M, the seventh amino acid is L or V, the eighth amino acid is A or S, the ninth amino acid is P or T, the eleventh amino acid is K or R. In one aspect, provided herein is an antibody that binds TRGV9, comprising a VL CDR1 having an amino acid sequence of SEQ ID NO:1184, wherein the fifth amino acid is D or N, the eighth amino acid is A or D; a VL CDR2 having an amino acid sequence of SEQ ID NO:1185; and a VL CDR3 having an amino acid sequence of SEQ ID NO:1186. In one aspect, provided herein is an antibody that binds TRGV9, comprising a VH CDR1 having an amino acid sequence of SEQ ID NO:1181, wherein the fifth amino acid is G or S, the sixth amino acid is A or S; a VH CDR2 having an amino acid sequence of SEQ ID NO:1182, wherein the third amino acid is S or T; a VH CDR3 having an amino acid sequence of SEQ ID NO:1183, wherein the sixth amino acid is I or M, the seventh amino acid is L or V, the eighth amino acid is A or S, the ninth amino acid is P or T, the eleventh amino acid is K or R; a VL CDR1 having an amino acid sequence of SEQ ID NO:1184, wherein the fifth amino acid is D or N, the eighth amino acid is A or D; a VL CDR2 having an amino acid sequence of SEQ ID NO:1185; and a VL CDR3 having an amino acid sequence of SEQ ID NO:1186.

[0166] In one aspect, provided herein is an antibody that binds to TRDV2. In some embodiments, the antibody comprises a heavy chain variable region and a light chain variable region. In some embodiments, the TRDV2 antibody is a humanized antibody.

[0167] In one aspect, provided herein is an antibody that binds TRDV2, comprising: (i) a VH comprising a VH CDR1, a VH CDR2, and a VH CDR3 having an amino acid sequence of SEQ ID NOs:2007, 2008, and 2009, respectively, and (ii) a VL comprising a VL CDR1, VL CDR2, and VL CDR3 having an amino acid sequence of SEQ ID NOs:2010, 2011, and 2012, respectively. In one aspect, provided herein is an antibody that binds TRDV2, comprising: (i) a VH comprising a VH CDR1, a VH CDR2, and a VH CDR3 having an amino acid sequence of SEQ ID NOs:2013, 2014, and 2015, respectively, and (ii) a VL comprising a VL CDR1, VL CDR2, and VL CDR3 having an amino acid sequence of SEQ ID NOs:2016, 2017, and 2018, respectively. In one aspect, provided herein is an antibody that binds TRDV2, comprising: (i) a VH comprising a VH CDR1, a VH CDR2, and a VH CDR3 having an amino acid sequence of SEQ ID NOs:2019, 2020, and 2021, respectively, and (ii) a VL comprising a VL CDR1, VL CDR2, and VL CDR3 having an amino acid sequence of SEQ ID NOs:2022, 2023, and 2024, respectively. In one aspect, provided herein is an antibody that binds TRDV2, comprising: (i) a VH comprising a VH CDR1, a VH CDR2, and a VH CDR3 having an amino acid sequence of SEQ ID NOs:2025, 2026, and 2027, respectively, and (ii) a VL comprising a VL CDR1, VL CDR2, and VL CDR3 having an amino acid sequence of SEQ ID NOs:2028, 2029, and 2030, respectively. In one aspect, provided herein is an antibody that binds TRDV2, comprising: (i) a VH comprising a VH CDR1, a VH CDR2, and a VH CDR3 having an amino acid sequence of SEQ ID NOs:2031, 2032, and 2033, respectively, and (ii) a VL comprising a VL CDR1, VL CDR2, and VL CDR3 having an amino acid sequence of SEQ ID NOs:2034, 2035, and 2036, respectively. In one aspect, provided herein is an antibody that binds TRDV2, comprising: (i) a VH comprising a VH CDR1, a VH CDR2, and a VH CDR3 having an amino acid sequence of a VH CDR1, a VH CDR2, and a VH CDR3, respectively, of a VH having an amino acid sequence of SEQ ID NO:2037; and (ii) a VL comprising a VL CDR1, a VL CDR2, and a VL CDR3 having an amino acid sequence of a VL CDR1, a VL CDR2, and a VL CDR3, respectively, of SEQ ID NO:2038. In one aspect, provided herein is an antibody that binds TRDV2, comprising a VH having an amino acid sequence of SEQ ID NO:2037. In one aspect, provided herein is an antibody that binds TRDV2, comprising a VL having an amino acid sequence of SEQ ID NO:2038. In one aspect, provided herein is an antibody that binds TRDV2, comprising a VH having an amino acid sequence of SEQ ID NO:2037, and a VL having an amino acid sequence of SEQ ID NO:2038. In one aspect, provided herein is an antibody that binds TRDV2, comprising a heavy chain having an amino acid sequence of SEQ ID NO:2039. In one aspect, provided herein is an antibody that binds TRDV2, comprising a light chain having an amino acid sequence of SEQ ID NO:2040. In one aspect, provided herein is an antibody that binds TRDV2, comprising a heavy chain having an amino acid sequence of SEQ ID NO:2039, and a light chain having an amino acid sequence of SEQ ID NO:2040. In one aspect, provided herein is an antibody that binds TRDV2, comprising a VH having an amino acid sequence having at least 95% identity to an amino acid sequence of SEQ ID NO:2037. In one aspect, provided herein is an antibody that binds TRDV2, comprising a VL having an amino acid sequence having at least 95% identity to an amino acid sequence of SEQ ID NO:2038. In one aspect, provided herein is an antibody that binds TRDV2, comprising a VH having an amino acid sequence having at least 95% identity to an amino acid sequence of SEQ ID NO:2037, and a VL having an amino acid sequence having at least 95% identity to an amino acid sequence of SEQ ID NO:2038. In one aspect, provided herein is an antibody that binds TRDV2, comprising a heavy chain having an amino acid sequence having at least 95% identity to an amino acid sequence of SEQ ID NO:2039. In one aspect, provided herein is an antibody that binds TRDV2, comprising a light chain having an amino acid sequence having at least 95% identity to an amino acid sequence of SEQ ID NO:2040. In one aspect, provided herein is an antibody that binds TRDV2, comprising a heavy chain having an amino acid sequence having at least 95% identity to an amino acid sequence of SEQ ID NO:2039, and a light chain having an amino acid sequence having at least 95% identity to an amino acid sequence of SEQ ID NO:2040.

[0168] In one aspect, provided herein is an antibody that binds TRDV2, comprising: (i) a VH comprising a VH CDR1, a VH CDR2, and a VH CDR3 having an amino acid sequence of SEQ ID NOs:2041, 2042, and 2043, respectively, and (ii) a VL comprising a VL CDR1, VL CDR2, and VL CDR3 having an amino acid sequence of SEQ ID NOs:2044, 2045, and 2046, respectively. In one aspect, provided herein is an antibody that binds TRDV2, comprising: (i) a VH comprising a VH CDR1, a VH CDR2, and a VH CDR3 having an amino acid sequence of SEQ ID NOs:2047, 2048, and 2049, respectively, and (ii) a VL comprising a VL CDR1, VL CDR2, and VL CDR3 having an amino acid sequence of SEQ ID NOs:2050, 2051, and 2052, respectively. In one aspect, provided herein is an antibody that binds TRDV2, comprising: (i) a VH comprising a VH CDR1, a VH CDR2, and a VH CDR3 having an amino acid sequence of SEQ ID NOs:2053, 2054, and 2055, respectively, and (ii) a VL comprising a VL CDR1, VL CDR2, and VL CDR3 having an amino acid sequence of SEQ ID NOs:2056, 2057, and 2058, respectively. In one aspect, provided herein is an antibody that binds TRDV2, comprising: (i) a VH comprising a VH CDR1, a VH CDR2, and a VH CDR3 having an amino acid sequence of SEQ ID NOs:2059, 2060, and 2061, respectively, and (ii) a VL comprising a VL CDR1, VL CDR2, and VL CDR3 having an amino acid sequence of SEQ ID NOs:2062, 2063, and 2064, respectively. In one aspect, provided herein is an antibody that binds TRDV2, comprising: (i) a VH comprising a VH CDR1, a VH CDR2, and a VH CDR3 having an amino acid sequence of SEQ ID NOs:2065, 2066, and 2067, respectively, and (ii) a VL comprising a VL CDR1, VL CDR2, and VL CDR3 having an amino acid sequence of SEQ ID NOs:2068, 2069, and 2070, respectively. In one aspect, provided herein is an antibody that binds TRDV2, comprising: (i) a VH comprising a VH CDR1, a VH CDR2, and a VH CDR3 having an amino acid sequence of a VH CDR1, a VH CDR2, and a VH CDR3, respectively, of a VH having an amino acid sequence of SEQ ID NO:2071; and (ii) a VL comprising a VL CDR1, a VL CDR2, and a VL CDR3 having an amino acid sequence of a VL CDR1, a VL CDR2, and a VL CDR3, respectively, of SEQ ID NO:2072. In one aspect, provided herein is an antibody that binds TRDV2, comprising a VH having an amino acid sequence of SEQ ID NO:2071. In one aspect, provided herein is an antibody that binds TRDV2, comprising a VL having an amino acid sequence of SEQ ID NO:2072. In one aspect, provided herein is an antibody that binds TRDV2, comprising a VH having an amino acid sequence of SEQ ID NO:2071, and a VL having an amino acid sequence of SEQ ID NO:2072. In one aspect, provided herein is an antibody that binds TRDV2, comprising a heavy chain having an amino acid sequence of SEQ ID NO:2073. In one aspect, provided herein is an antibody that binds TRDV2, comprising a light chain having an amino acid sequence of SEQ ID NO:2074. In one aspect, provided herein is an antibody that binds TRDV2, comprising a heavy chain having an amino acid sequence of SEQ ID NO:2073, and a light chain having an amino acid sequence of SEQ ID NO:2074. In one aspect, provided herein is an antibody that binds TRDV2, comprising a VH having an amino acid sequence having at least 95% identity to an amino acid sequence of SEQ ID NO:2071. In one aspect, provided herein is an antibody that binds TRDV2, comprising a VL having an amino acid sequence having at least 95% identity to an amino acid sequence of SEQ ID NO:2072. In one aspect, provided herein is an antibody that binds TRDV2, comprising a VH having an amino acid sequence having at least 95% identity to an amino acid sequence of SEQ ID NO:2071, and a VL having an amino acid sequence having at least 95% identity to an amino acid sequence of SEQ ID NO:2072. In one aspect, provided herein is an antibody that binds TRDV2, comprising a heavy chain having an amino acid sequence having at least 95% identity to an amino acid sequence of SEQ ID NO:2073. In one aspect, provided herein is an antibody that binds TRDV2, comprising a light chain having an amino acid sequence having at least 95% identity to an amino acid sequence of SEQ ID NO:2074. In one aspect, provided herein is an antibody that binds TRDV2, comprising a heavy chain having an amino acid sequence having at least 95% identity to an amino acid sequence of SEQ ID NO:2073, and a light chain having an amino acid sequence having at least 95% identity to an amino acid sequence of SEQ ID NO:2074.

[0169] In one aspect, provided herein is an antibody that binds TRDV2, comprising: (i) a VH comprising a VH CDR1, a VH CDR2, and a VH CDR3 having an amino acid sequence of SEQ ID NOs:2075, 2076, and 2077, respectively, and (ii) a VL comprising a VL CDR1, VL CDR2, and VL CDR3 having an amino acid sequence of SEQ ID NOs:2078, 2079, and 2080, respectively. In one aspect, provided herein is an antibody that binds TRDV2, comprising: (i) a VH comprising a VH CDR1, a VH CDR2, and a VH CDR3 having an amino acid sequence of SEQ ID NOs:2081, 2082, and 2083, respectively, and (ii) a VL comprising a VL CDR1, VL CDR2, and VL CDR3 having an amino acid sequence of SEQ ID NOs:2084, 2085, and 2086, respectively. In one aspect, provided herein is an antibody that binds TRDV2, comprising: (i) a VH comprising a VH CDR1, a VH CDR2, and a VH CDR3 having an amino acid sequence of SEQ ID NOs:2087, 2088, and 2089, respectively, and (ii) a VL comprising a VL CDR1, VL CDR2, and VL CDR3 having an amino acid sequence of SEQ ID NOs:2090, 2091, and 2092, respectively. In one aspect, provided herein is an antibody that binds TRDV2, comprising: (i) a VH comprising a VH CDR1, a VH CDR2, and a VH CDR3 having an amino acid sequence of SEQ ID NOs:2093, 2094, and 2095, respectively, and (ii) a VL comprising a VL CDR1, VL CDR2, and VL CDR3 having an amino acid sequence of SEQ ID NOs:2096, 2097, and 2098, respectively. In one aspect, provided herein is an antibody that binds TRDV2, comprising: (i) a VH comprising a VH CDR1, a VH CDR2, and a VH CDR3 having an amino acid sequence of SEQ ID NOs:2099, 2100, and 2101, respectively, and (ii) a VL comprising a VL CDR1, VL CDR2, and VL CDR3 having an amino acid sequence of SEQ ID NOs:2102, 2103, and 2104, respectively. In one aspect, provided herein is an antibody that binds TRDV2, comprising: (i) a VH comprising a VH CDR1, a VH CDR2, and a VH CDR3 having an amino acid sequence of a VH CDR1, a VH CDR2, and a VH CDR3, respectively, of a VH having an amino acid sequence of SEQ ID NO:2105; and (ii) a VL comprising a VL CDR1, a VL CDR2, and a VL CDR3 having an amino acid sequence of a VL CDR1, a VL CDR2, and a VL CDR3, respectively, of SEQ ID NO:2106. In one aspect, provided herein is an antibody that binds TRDV2, comprising a VH having an amino acid sequence of SEQ ID NO:2105. In one aspect, provided herein is an antibody that binds TRDV2, comprising a VL having an amino acid sequence of SEQ ID NO:2106. In one aspect, provided herein is an antibody that binds TRDV2, comprising a VH having an amino acid sequence of SEQ ID NO:2105, and a VL having an amino acid sequence of SEQ ID NO:2106. In one aspect, provided herein is an antibody that binds TRDV2, comprising a heavy chain having an amino acid sequence of SEQ ID NO:2107. In one aspect, provided herein is an antibody that binds TRDV2, comprising a light chain having an amino acid sequence of SEQ ID NO:2108. In one aspect, provided herein is an antibody that binds TRDV2, comprising a heavy chain having an amino acid sequence of SEQ ID NO:2107, and a light chain having an amino acid sequence of SEQ ID NO:2108. In one aspect, provided herein is an antibody that binds TRDV2, comprising a VH having an amino acid sequence having at least 95% identity to an amino acid sequence of SEQ ID NO:2105. In one aspect, provided herein is an antibody that binds TRDV2, comprising a VL having an amino acid sequence having at least 95% identity to an amino acid sequence of SEQ ID NO:2106. In one aspect, provided herein is an antibody that binds TRDV2, comprising a VH having an amino acid sequence having at least 95% identity to an amino acid sequence of SEQ ID NO:2105, and a VL having an amino acid sequence having at least 95% identity to an amino acid sequence of SEQ ID NO:2106. In one aspect, provided herein is an antibody that binds TRDV2, comprising a heavy chain having an amino acid sequence having at least 95% identity to an amino acid sequence of SEQ ID NO:2107. In one aspect, provided herein is an antibody that binds TRDV2, comprising a light chain having an amino acid sequence having at least 95% identity to an amino acid sequence of SEQ ID NO:2108. In one aspect, provided herein is an antibody that binds TRDV2, comprising a heavy chain having an amino acid sequence having at least 95% identity to an amino acid sequence of SEQ ID NO:2107, and a light chain having an amino acid sequence having at least 95% identity to an amino acid sequence of SEQ ID NO:2108.

[0170] In one aspect, provided herein is an antibody that binds TRDV2, comprising: (i) a VH comprising a VH CDR1, a VH CDR2, and a VH CDR3 having an amino acid sequence of SEQ ID NOs:2109, 2110, and 2111, respectively, and (ii) a VL comprising a VL CDR1, VL CDR2, and VL CDR3 having an amino acid sequence of SEQ ID NOs:2112, 2113, and 2114, respectively. In one aspect, provided herein is an antibody that binds TRDV2, comprising: (i) a VH comprising a VH CDR1, a VH CDR2, and a VH CDR3 having an amino acid sequence of SEQ ID NOs:2115, 2116, and 2117, respectively, and (ii) a VL comprising a VL CDR1, VL CDR2, and VL CDR3 having an amino acid sequence of SEQ ID NOs:2118, 2119, and 2120, respectively. In one aspect, provided herein is an antibody that binds TRDV2, comprising: (i) a VH comprising a VH CDR1, a VH CDR2, and a VH CDR3 having an amino acid sequence of SEQ ID NOs:2121, 2122, and 2123, respectively, and (ii) a VL comprising a VL CDR1, VL CDR2, and VL CDR3 having an amino acid sequence of SEQ ID NOs:2124, 2125, and 2126, respectively. In one aspect, provided herein is an antibody that binds TRDV2, comprising: (i) a VH comprising a VH CDR1, a VH CDR2, and a VH CDR3 having an amino acid sequence of SEQ ID NOs:2127, 2128, and 2129, respectively, and (ii) a VL comprising a VL CDR1, VL CDR2, and VL CDR3 having an amino acid sequence of SEQ ID NOs:2130, 2131, and 2132, respectively. In one aspect, provided herein is an antibody that binds TRDV2, comprising: (i) a VH comprising a VH CDR1, a VH CDR2, and a VH CDR3 having an amino acid sequence of SEQ ID NOs:2133, 2134, and 2135, respectively, and (ii) a VL comprising a VL CDR1, VL CDR2, and VL CDR3 having an amino acid sequence of SEQ ID NOs:2136, 2137, and 2138, respectively. In one aspect, provided herein is an antibody that binds TRDV2, comprising: (i) a VH comprising a VH CDR1, a VH CDR2, and a VH CDR3 having an amino acid sequence of a VH CDR1, a VH CDR2, and a VH CDR3, respectively, of a VH having an amino acid sequence of SEQ ID NO:2139; and (ii) a VL comprising a VL CDR1, a VL CDR2, and a VL CDR3 having an amino acid sequence of a VL CDR1, a VL CDR2, and a VL CDR3, respectively, of SEQ ID NO:2140. In one aspect, provided herein is an antibody that binds TRDV2, comprising a VH having an amino acid sequence of SEQ ID NO:2139. In one aspect, provided herein is an antibody that binds TRDV2, comprising a VL having an amino acid sequence of SEQ ID NO:2140. In one aspect, provided herein is an antibody that binds TRDV2, comprising a VH having an amino acid sequence of SEQ ID NO:2139, and a VL having an amino acid sequence of SEQ ID NO:2140. In one aspect, provided herein is an antibody that binds TRDV2, comprising a heavy chain having an amino acid sequence of SEQ ID NO:2141. In one aspect, provided herein is an antibody that binds TRDV2, comprising a light chain having an amino acid sequence of SEQ ID NO:2142. In one aspect, provided herein is an antibody that binds TRDV2, comprising a heavy chain having an amino acid sequence of SEQ ID NO:2141, and a light chain having an amino acid sequence of SEQ ID NO:2142. In one aspect, provided herein is an antibody that binds TRDV2, comprising a VH having an amino acid sequence having at least 95% identity to an amino acid sequence of SEQ ID NO:2139. In one aspect, provided herein is an antibody that binds TRDV2, comprising a VL having an amino acid sequence having at least 95% identity to an amino acid sequence of SEQ ID NO:2140. In one aspect, provided herein is an antibody that binds TRDV2, comprising a VH having an amino acid sequence having at least 95% identity to an amino acid sequence of SEQ ID NO:2139, and a VL having an amino acid sequence having at least 95% identity to an amino acid sequence of SEQ ID NO:2140. In one aspect, provided herein is an antibody that binds TRDV2, comprising a heavy chain having an amino acid sequence having at least 95% identity to an amino acid sequence of SEQ ID NO:2141. In one aspect, provided herein is an antibody that binds TRDV2, comprising a light chain having an amino acid sequence having at least 95% identity to an amino acid sequence of SEQ ID NO:2142. In one aspect, provided herein is an antibody that binds TRDV2, comprising a heavy chain having an amino acid sequence having at least 95% identity to an amino acid sequence of SEQ ID NO:2141, and a light chain having an amino acid sequence having at least 95% identity to an amino acid sequence of SEQ ID NO:2142.

[0171] In one aspect, provided herein is an antibody that binds TRDV2, comprising: (i) a VH comprising a VH CDR1, a VH CDR2, and a VH CDR3 having an amino acid sequence of SEQ ID NOs:2143, 2144, and 2145, respectively, and (ii) a VL comprising a VL CDR1, VL CDR2, and VL CDR3 having an amino acid sequence of SEQ ID NOs:2146, 2147, and 2148, respectively. In one aspect, provided herein is an antibody that binds TRDV2, comprising: (i) a VH comprising a VH CDR1, a VH CDR2, and a VH CDR3 having an amino acid sequence of SEQ ID NOs:2149, 2150, and 2151, respectively, and (ii) a VL comprising a VL CDR1, VL CDR2, and VL CDR3 having an amino acid sequence of SEQ ID NOs:2152, 2153, and 2154, respectively. In one aspect, provided herein is an antibody that binds TRDV2, comprising: (i) a VH comprising a VH CDR1, a VH CDR2, and a VH CDR3 having an amino acid sequence of SEQ ID NOs:2155, 2156, and 2157, respectively, and (ii) a VL comprising a VL CDR1, VL CDR2, and VL CDR3 having an amino acid sequence of SEQ ID NOs:2158, 2159, and 2160, respectively. In one aspect, provided herein is an antibody that binds TRDV2, comprising: (i) a VH comprising a VH CDR1, a VH CDR2, and a VH CDR3 having an amino acid sequence of SEQ ID NOs:2161, 2162, and 2163, respectively, and (ii) a VL comprising a VL CDR1, VL CDR2, and VL CDR3 having an amino acid sequence of SEQ ID NOs:2164, 2165, and 2166, respectively. In one aspect, provided herein is an antibody that binds TRDV2, comprising: (i) a VH comprising a VH CDR1, a VH CDR2, and a VH CDR3 having an amino acid sequence of SEQ ID NOs:2167, 2168, and 2169, respectively, and (ii) a VL comprising a VL CDR1, VL CDR2, and VL CDR3 having an amino acid sequence of SEQ ID NOs:2170, 2171, and 2172, respectively. In one aspect, provided herein is an antibody that binds TRDV2, comprising: (i) a VH comprising a VH CDR1, a VH CDR2, and a VH CDR3 having an amino acid sequence of a VH CDR1, a VH CDR2, and a VH CDR3, respectively, of a VH having an amino acid sequence of SEQ ID NO:2173; and (ii) a VL comprising a VL CDR1, a VL CDR2, and a VL CDR3 having an amino acid sequence of a VL CDR1, a VL CDR2, and a VL CDR3, respectively, of SEQ ID NO:2174. In one aspect, provided herein is an antibody that binds TRDV2, comprising a VH having an amino acid sequence of SEQ ID NO:2173. In one aspect, provided herein is an antibody that binds TRDV2, comprising a VL having an amino acid sequence of SEQ ID NO:2174. In one aspect, provided herein is an antibody that binds TRDV2, comprising a VH having an amino acid sequence of SEQ ID NO:2173, and a VL having an amino acid sequence of SEQ ID NO:2174. In one aspect, provided herein is an antibody that binds TRDV2, comprising a heavy chain having an amino acid sequence of SEQ ID NO:2175. In one aspect, provided herein is an antibody that binds TRDV2, comprising a light chain having an amino acid sequence of SEQ ID NO:2176. In one aspect, provided herein is an antibody that binds TRDV2, comprising a heavy chain having an amino acid sequence of SEQ ID NO:2175, and a light chain having an amino acid sequence of SEQ ID NO:2176. In one aspect, provided herein is an antibody that binds TRDV2, comprising a VH having an amino acid sequence having at least 95% identity to an amino acid sequence of SEQ ID NO:2173. In one aspect, provided herein is an antibody that binds TRDV2, comprising a VL having an amino acid sequence having at least 95% identity to an amino acid sequence of SEQ ID NO:2174. In one aspect, provided herein is an antibody that binds TRDV2, comprising a VH having an amino acid sequence having at least 95% identity to an amino acid sequence of SEQ ID NO:2173, and a VL having an amino acid sequence having at least 95% identity to an amino acid sequence of SEQ ID NO:2174. In one aspect, provided herein is an antibody that binds TRDV2, comprising a heavy chain having an amino acid sequence having at least 95% identity to an amino acid sequence of SEQ ID NO:2175. In one aspect, provided herein is an antibody that binds TRDV2, comprising a light chain having an amino acid sequence having at least 95% identity to an amino acid sequence of SEQ ID NO:2176. In one aspect, provided herein is an antibody that binds TRDV2, comprising a heavy chain having an amino acid sequence having at least 95% identity to an amino acid sequence of SEQ ID NO:2175, and a light chain having an amino acid sequence having at least 95% identity to an amino acid sequence of SEQ ID NO:2176.

[0172] In one aspect, provided herein is an antibody that binds TRDV2, comprising: (i) a VH comprising a VH CDR1, a VH CDR2, and a VH CDR3 having an amino acid sequence of SEQ ID NOs:2177, 2178, and 2179, respectively, and (ii) a VL comprising a VL CDR1, VL CDR2, and VL CDR3 having an amino acid sequence of SEQ ID NOs:2180, 2181, and 2182, respectively. In one aspect, provided herein is an antibody that binds TRDV2, comprising: (i) a VH comprising a VH CDR1, a VH CDR2, and a VH CDR3 having an amino acid sequence of SEQ ID NOs:2183, 2184, and 2185, respectively, and (ii) a VL comprising a VL CDR1, VL CDR2, and VL CDR3 having an amino acid sequence of SEQ ID NOs:2186, 2187, and 2188, respectively. In one aspect, provided herein is an antibody that binds TRDV2, comprising: (i) a VH comprising a VH CDR1, a VH CDR2, and a VH CDR3 having an amino acid sequence of SEQ ID NOs:2189, 2190, and 2191, respectively, and (ii) a VL comprising a VL CDR1, VL CDR2, and VL CDR3 having an amino acid sequence of SEQ ID NOs:2192, 2193, and 2194, respectively. In one aspect, provided herein is an antibody that binds TRDV2, comprising: (i) a VH comprising a VH CDR1, a VH CDR2, and a VH CDR3 having an amino acid sequence of SEQ ID NOs:2195, 2196, and 2197, respectively, and (ii) a VL comprising a VL CDR1, VL CDR2, and VL CDR3 having an amino acid sequence of SEQ ID NOs:2198, 2199, and 2200, respectively. In one aspect, provided herein is an antibody that binds TRDV2, comprising: (i) a VH comprising a VH CDR1, a VH CDR2, and a VH CDR3 having an amino acid sequence of SEQ ID NOs:2201, 2202, and 2203, respectively, and (ii) a VL comprising a VL CDR1, VL CDR2, and VL CDR3 having an amino acid sequence of SEQ ID NOs:2204, 2205, and 2206, respectively. In one aspect, provided herein is an antibody that binds TRDV2, comprising: (i) a VH comprising a VH CDR1, a VH CDR2, and a VH CDR3 having an amino acid sequence of a VH CDR1, a VH CDR2, and a VH CDR3, respectively, of a VH having an amino acid sequence of SEQ ID NO:2207; and (ii) a VL comprising a VL CDR1, a VL CDR2, and a VL CDR3 having an amino acid sequence of a VL CDR1, a VL CDR2, and a VL CDR3, respectively, of SEQ ID NO:2208. In one aspect, provided herein is an antibody that binds TRDV2, comprising a VH having an amino acid sequence of SEQ ID NO:2207. In one aspect, provided herein is an antibody that binds TRDV2, comprising a VL having an amino acid sequence of SEQ ID NO:2208. In one aspect, provided herein is an antibody that binds TRDV2, comprising a VH having an amino acid sequence of SEQ ID NO:2207, and a VL having an amino acid sequence of SEQ ID NO:2208. In one aspect, provided herein is an antibody that binds TRDV2, comprising a heavy chain having an amino acid sequence of SEQ ID NO:2209. In one aspect, provided herein is an antibody that binds TRDV2, comprising a light chain having an amino acid sequence of SEQ ID NO:2210. In one aspect, provided herein is an antibody that binds TRDV2, comprising a heavy chain having an amino acid sequence of SEQ ID NO:2209, and a light chain having an amino acid sequence of SEQ ID NO:2210. In one aspect, provided herein is an antibody that binds TRDV2, comprising a VH having an amino acid sequence having at least 95% identity to an amino acid sequence of SEQ ID NO:2207. In one aspect, provided herein is an antibody that binds TRDV2, comprising a VL having an amino acid sequence having at least 95% identity to an amino acid sequence of SEQ ID NO:2208. In one aspect, provided herein is an antibody that binds TRDV2, comprising a VH having an amino acid sequence having at least 95% identity to an amino acid sequence of SEQ ID NO:2207, and a VL having an amino acid sequence having at least 95% identity to an amino acid sequence of SEQ ID NO:2208. In one aspect, provided herein is an antibody that binds TRDV2, comprising a heavy chain having an amino acid sequence having at least 95% identity to an amino acid sequence of SEQ ID NO:2209. In one aspect, provided herein is an antibody that binds TRDV2, comprising a light chain having an amino acid sequence having at least 95% identity to an amino acid sequence of SEQ ID NO:2210. In one aspect, provided herein is an antibody that binds TRDV2, comprising a heavy chain having an amino acid sequence having at least 95% identity to an amino acid sequence of SEQ ID NO:2209, and a light chain having an amino acid sequence having at least 95% identity to an amino acid sequence of SEQ ID NO:2210.

[0173] In one aspect, provided herein is an antibody that binds TRDV2, comprising: (i) a VH comprising a VH CDR1, a VH CDR2, and a VH CDR3 having an amino acid sequence of SEQ ID NOs:2211, 2212, and 2213, respectively, and (ii) a VL comprising a VL CDR1, VL CDR2, and VL CDR3 having an amino acid sequence of SEQ ID NOs:2214, 2215, and 2216, respectively. In one aspect, provided herein is an antibody that binds TRDV2, comprising: (i) a VH comprising a VH CDR1, a VH CDR2, and a VH CDR3 having an amino acid sequence of SEQ ID NOs:2217, 2218, and 2219, respectively, and (ii) a VL comprising a VL CDR1, VL CDR2, and VL CDR3 having an amino acid sequence of SEQ ID NOs:2220, 2221, and 2222, respectively. In one aspect, provided herein is an antibody that binds TRDV2, comprising: (i) a VH comprising a VH CDR1, a VH CDR2, and a VH CDR3 having an amino acid sequence of SEQ ID NOs:2223, 2224, and 2225, respectively, and (ii) a VL comprising a VL CDR1, VL CDR2, and VL CDR3 having an amino acid sequence of SEQ ID NOs:2226, 2227, and 2228, respectively. In one aspect, provided herein is an antibody that binds TRDV2, comprising: (i) a VH comprising a VH CDR1, a VH CDR2, and a VH CDR3 having an amino acid sequence of SEQ ID NOs:2229, 2230, and 2231, respectively, and (ii) a VL comprising a VL CDR1, VL CDR2, and VL CDR3 having an amino acid sequence of SEQ ID NOs:2232, 2233, and 2234, respectively. In one aspect, provided herein is an antibody that binds TRDV2, comprising: (i) a VH comprising a VH CDR1, a VH CDR2, and a VH CDR3 having an amino acid sequence of SEQ ID NOs:2235, 2236, and 2237, respectively, and (ii) a VL comprising a VL CDR1, VL CDR2, and VL CDR3 having an amino acid sequence of SEQ ID NOs:2238, 2239, and 2240, respectively. In one aspect, provided herein is an antibody that binds TRDV2, comprising: (i) a VH comprising a VH CDR1, a VH CDR2, and a VH CDR3 having an amino acid sequence of a VH CDR1, a VH CDR2, and a VH CDR3, respectively, of a VH having an amino acid sequence of SEQ ID NO:2241; and (ii) a VL comprising a VL CDR1, a VL CDR2, and a VL CDR3 having an amino acid sequence of a VL CDR1, a VL CDR2, and a VL CDR3, respectively, of SEQ ID NO:2242. In one aspect, provided herein is an antibody that binds TRDV2, comprising a VH having an amino acid sequence of SEQ ID NO:2241. In one aspect, provided herein is an antibody that binds TRDV2, comprising a VL having an amino acid sequence of SEQ ID NO:2242. In one aspect, provided herein is an antibody that binds TRDV2, comprising a VH having an amino acid sequence of SEQ ID NO:2241, and a VL having an amino acid sequence of SEQ ID NO:2242. In one aspect, provided herein is an antibody that binds TRDV2, comprising a heavy chain having an amino acid sequence of SEQ ID NO:2243. In one aspect, provided herein is an antibody that binds TRDV2, comprising a light chain having an amino acid sequence of SEQ ID NO:2244. In one aspect, provided herein is an antibody that binds TRDV2, comprising a heavy chain having an amino acid sequence of SEQ ID NO:2243, and a light chain having an amino acid sequence of SEQ ID NO:2244. In one aspect, provided herein is an antibody that binds TRDV2, comprising a VH having an amino acid sequence having at least 95% identity to an amino acid sequence of SEQ ID NO:2241. In one aspect, provided herein is an antibody that binds TRDV2, comprising a VL having an amino acid sequence having at least 95% identity to an amino acid sequence of SEQ ID NO:2242. In one aspect, provided herein is an antibody that binds TRDV2, comprising a VH having an amino acid sequence having at least 95% identity to an amino acid sequence of SEQ ID NO:2241, and a VL having an amino acid sequence having at least 95% identity to an amino acid sequence of SEQ ID NO:2242. In one aspect, provided herein is an antibody that binds TRDV2, comprising a heavy chain having an amino acid sequence having at least 95% identity to an amino acid sequence of SEQ ID NO:2243. In one aspect, provided herein is an antibody that binds TRDV2, comprising a light chain having an amino acid sequence having at least 95% identity to an amino acid sequence of SEQ ID NO:2244. In one aspect, provided herein is an antibody that binds TRDV2, comprising a heavy chain having an amino acid sequence having at least 95% identity to an amino acid sequence of SEQ ID NO:2243, and a light chain having an amino acid sequence having at least 95% identity to an amino acid sequence of SEQ ID NO:2244.

[0174] In one aspect, provided herein is an antibody that binds TRDV2, comprising: (i) a VH comprising a VH CDR1, a VH CDR2, and a VH CDR3 having an amino acid sequence of SEQ ID NOs:2245, 2246, and 2247, respectively, and (ii) a VL comprising a VL CDR1, VL CDR2, and VL CDR3 having an amino acid sequence of SEQ ID NOs:2248, 2249, and 2250, respectively. In one aspect, provided herein is an antibody that binds TRDV2, comprising: (i) a VH comprising a VH CDR1, a VH CDR2, and a VH CDR3 having an amino acid sequence of SEQ ID NOs:2251, 2252, and 2253, respectively, and (ii) a VL comprising a VL CDR1, VL CDR2, and VL CDR3 having an amino acid sequence of SEQ ID NOs:2254, 2255, and 2256, respectively. In one aspect, provided herein is an antibody that binds TRDV2, comprising: (i) a VH comprising a VH CDR1, a VH CDR2, and a VH CDR3 having an amino acid sequence of SEQ ID NOs:2257, 2258, and 2259, respectively, and (ii) a VL comprising a VL CDR1, VL CDR2, and VL CDR3 having an amino acid sequence of SEQ ID NOs:2260, 2261, and 2262, respectively. In one aspect, provided herein is an antibody that binds TRDV2, comprising: (i) a VH comprising a VH CDR1, a VH CDR2, and a VH CDR3 having an amino acid sequence of SEQ ID NOs:2263, 2264, and 2265, respectively, and (ii) a VL comprising a VL CDR1, VL CDR2, and VL CDR3 having an amino acid sequence of SEQ ID NOs:2266, 2267, and 2268, respectively. In one aspect, provided herein is an antibody that binds TRDV2, comprising: (i) a VH comprising a VH CDR1, a VH CDR2, and a VH CDR3 having an amino acid sequence of SEQ ID NOs:2269, 2270, and 2271, respectively, and (ii) a VL comprising a VL CDR1, VL CDR2, and VL CDR3 having an amino acid sequence of SEQ ID NOs:2272, 2273, and 2274, respectively. In one aspect, provided herein is an antibody that binds TRDV2, comprising: (i) a VH comprising a VH CDR1, a VH CDR2, and a VH CDR3 having an amino acid sequence of a VH CDR1, a VH CDR2, and a VH CDR3, respectively, of a VH having an amino acid sequence of SEQ ID NO:2275; and (ii) a VL comprising a VL CDR1, a VL CDR2, and a VL CDR3 having an amino acid sequence of a VL CDR1, a VL CDR2, and a VL CDR3, respectively, of SEQ ID NO:2276. In one aspect, provided herein is an antibody that binds TRDV2, comprising a VH having an amino acid sequence of SEQ ID NO:2275. In one aspect, provided herein is an antibody that binds TRDV2, comprising a VL having an amino acid sequence of SEQ ID NO:2276. In one aspect, provided herein is an antibody that binds TRDV2, comprising a VH having an amino acid sequence of SEQ ID NO:2275, and a VL having an amino acid sequence of SEQ ID NO:2276. In one aspect, provided herein is an antibody that binds TRDV2, comprising a heavy chain having an amino acid sequence of SEQ ID NO:2277. In one aspect, provided herein is an antibody that binds TRDV2, comprising a light chain having an amino acid sequence of SEQ ID NO:2278. In one aspect, provided herein is an antibody that binds TRDV2, comprising a heavy chain having an amino acid sequence of SEQ ID NO:2277, and a light chain having an amino acid sequence of SEQ ID NO:2278. In one aspect, provided herein is an antibody that binds TRDV2, comprising a VH having an amino acid sequence having at least 95% identity to an amino acid sequence of SEQ ID NO:2275. In one aspect, provided herein is an antibody that binds TRDV2, comprising a VL having an amino acid sequence having at least 95% identity to an amino acid sequence of SEQ ID NO:2276. In one aspect, provided herein is an antibody that binds TRDV2, comprising a VH having an amino acid sequence having at least 95% identity to an amino acid sequence of SEQ ID NO:2275, and a VL having an amino acid sequence having at least 95% identity to an amino acid sequence of SEQ ID NO:2276. In one aspect, provided herein is an antibody that binds TRDV2, comprising a heavy chain having an amino acid sequence having at least 95% identity to an amino acid sequence of SEQ ID NO:2277. In one aspect, provided herein is an antibody that binds TRDV2, comprising a light chain having an amino acid sequence having at least 95% identity to an amino acid sequence of SEQ ID NO:2278. In one aspect, provided herein is an antibody that binds TRDV2, comprising a heavy chain having an amino acid sequence having at least 95% identity to an amino acid sequence of SEQ ID NO:2277, and a light chain having an amino acid sequence having at least 95% identity to an amino acid sequence of SEQ ID NO:2278.

[0175] In one aspect, provided herein is an antibody that binds TRDV2, comprising: (i) a VH comprising a VH CDR1, a VH CDR2, and a VH CDR3 having an amino acid sequence of SEQ ID NOs:2279, 2280, and 2281, respectively, and (ii) a VL comprising a VL CDR1, VL CDR2, and VL CDR3 having an amino acid sequence of SEQ ID NOs:2282, 2283, and 2284, respectively. In one aspect, provided herein is an antibody that binds TRDV2, comprising: (i) a VH comprising a VH CDR1, a VH CDR2, and a VH CDR3 having an amino acid sequence of SEQ ID NOs:2285, 2286, and 2287, respectively, and (ii) a VL comprising a VL CDR1, VL CDR2, and VL CDR3 having an amino acid sequence of SEQ ID NOs:2288, 2289, and 2290, respectively. In one aspect, provided herein is an antibody that binds TRDV2, comprising: (i) a VH comprising a VH CDR1, a VH CDR2, and a VH CDR3 having an amino acid sequence of SEQ ID NOs:2291, 2292, and 2293, respectively, and (ii) a VL comprising a VL CDR1, VL CDR2, and VL CDR3 having an amino acid sequence of SEQ ID NOs:2294, 2295, and 2296, respectively. In one aspect, provided herein is an antibody that binds TRDV2, comprising: (i) a VH comprising a VH CDR1, a VH CDR2, and a VH CDR3 having an amino acid sequence of SEQ ID NOs:2297, 2298, and 2299, respectively, and (ii) a VL comprising a VL CDR1, VL CDR2, and VL CDR3 having an amino acid sequence of SEQ ID NOs:2300, 2301, and 2302, respectively. In one aspect, provided herein is an antibody that binds TRDV2, comprising: (i) a VH comprising a VH CDR1, a VH CDR2, and a VH CDR3 having an amino acid sequence of SEQ ID NOs:2303, 2304, and 2305, respectively, and (ii) a VL comprising a VL CDR1, VL CDR2, and VL CDR3 having an amino acid sequence of SEQ ID NOs:2306, 2307, and 2308, respectively. In one aspect, provided herein is an antibody that binds TRDV2, comprising: (i) a VH comprising a VH CDR1, a VH CDR2, and a VH CDR3 having an amino acid sequence of a VH CDR1, a VH CDR2, and a VH CDR3, respectively, of a VH having an amino acid sequence of SEQ ID NO:2309; and (ii) a VL comprising a VL CDR1, a VL CDR2, and a VL CDR3 having an amino acid sequence of a VL CDR1, a VL CDR2, and a VL CDR3, respectively, of SEQ ID NO:2310. In one aspect, provided herein is an antibody that binds TRDV2, comprising a VH having an amino acid sequence of SEQ ID NO:2309. In one aspect, provided herein is an antibody that binds TRDV2, comprising a VL having an amino acid sequence of SEQ ID NO:2310. In one aspect, provided herein is an antibody that binds TRDV2, comprising a VH having an amino acid sequence of SEQ ID NO:2309, and a VL having an amino acid sequence of SEQ ID NO:2310. In one aspect, provided herein is an antibody that binds TRDV2, comprising a heavy chain having an amino acid sequence of SEQ ID NO:2311. In one aspect, provided herein is an antibody that binds TRDV2, comprising a light chain having an amino acid sequence of SEQ ID NO:2312. In one aspect, provided herein is an antibody that binds TRDV2, comprising a heavy chain having an amino acid sequence of SEQ ID NO:2311, and a light chain having an amino acid sequence of SEQ ID NO:2312. In one aspect, provided herein is an antibody that binds TRDV2, comprising a VH having an amino acid sequence having at least 95% identity to an amino acid sequence of SEQ ID NO:2309. In one aspect, provided herein is an antibody that binds TRDV2, comprising a VL having an amino acid sequence having at least 95% identity to an amino acid sequence of SEQ ID NO:2310. In one aspect, provided herein is an antibody that binds TRDV2, comprising a VH having an amino acid sequence having at least 95% identity to an amino acid sequence of SEQ ID NO:2309, and a VL having an amino acid sequence having at least 95% identity to an amino acid sequence of SEQ ID NO:2310. In one aspect, provided herein is an antibody that binds TRDV2, comprising a heavy chain having an amino acid sequence having at least 95% identity to an amino acid sequence of SEQ ID NO:2311. In one aspect, provided herein is an antibody that binds TRDV2, comprising a light chain having an amino acid sequence having at least 95% identity to an amino acid sequence of SEQ ID NO:2312. In one aspect, provided herein is an antibody that binds TRDV2, comprising a heavy chain having an amino acid sequence having at least 95% identity to an amino acid sequence of SEQ ID NO:2311, and a light chain having an amino acid sequence having at least 95% identity to an amino acid sequence of SEQ ID NO:2312.

[0176] In one aspect, provided herein is an antibody that binds TRDV2, comprising: (i) a VH comprising a VH CDR1, a VH CDR2, and a VH CDR3 having an amino acid sequence of SEQ ID NOs:2313, 2314, and 2315, respectively, and (ii) a VL comprising a VL CDR1, VL CDR2, and VL CDR3 having an amino acid sequence of SEQ ID NOs:2316, 2317, and 2318, respectively. In one aspect, provided herein is an antibody that binds TRDV2, comprising: (i) a VH comprising a VH CDR1, a VH CDR2, and a VH CDR3 having an amino acid sequence of SEQ ID NOs:2319, 2320, and 2321, respectively, and (ii) a VL comprising a VL CDR1, VL CDR2, and VL CDR3 having an amino acid sequence of SEQ ID NOs:2322, 2323, and 2324, respectively. In one aspect, provided herein is an antibody that binds TRDV2, comprising: (i) a VH comprising a VH CDR1, a VH CDR2, and a VH CDR3 having an amino acid sequence of SEQ ID NOs:2325, 2326, and 2327, respectively, and (ii) a VL comprising a VL CDR1, VL CDR2, and VL CDR3 having an amino acid sequence of SEQ ID NOs:2328, 2329, and 2330, respectively. In one aspect, provided herein is an antibody that binds TRDV2, comprising: (i) a VH comprising a VH CDR1, a VH CDR2, and a VH CDR3 having an amino acid sequence of SEQ ID NOs:2331, 2332, and 2333, respectively, and (ii) a VL comprising a VL CDR1, VL CDR2, and VL CDR3 having an amino acid sequence of SEQ ID NOs:2334, 2335, and 2336, respectively. In one aspect, provided herein is an antibody that binds TRDV2, comprising: (i) a VH comprising a VH CDR1, a VH CDR2, and a VH CDR3 having an amino acid sequence of SEQ ID NOs:2337, 2338, and 2339, respectively, and (ii) a VL comprising a VL CDR1, VL CDR2, and VL CDR3 having an amino acid sequence of SEQ ID NOs:2340, 2341, and 2342, respectively. In one aspect, provided herein is an antibody that binds TRDV2, comprising: (i) a VH comprising a VH CDR1, a VH CDR2, and a VH CDR3 having an amino acid sequence of a VH CDR1, a VH CDR2, and a VH CDR3, respectively, of a VH having an amino acid sequence of SEQ ID NO:2343; and (ii) a VL comprising a VL CDR1, a VL CDR2, and a VL CDR3 having an amino acid sequence of a VL CDR1, a VL CDR2, and a VL CDR3, respectively, of SEQ ID NO:2344. In one aspect, provided herein is an antibody that binds TRDV2, comprising a VH having an amino acid sequence of SEQ ID NO:2343. In one aspect, provided herein is an antibody that binds TRDV2, comprising a VL having an amino acid sequence of SEQ ID NO:2344. In one aspect, provided herein is an antibody that binds TRDV2, comprising a VH having an amino acid sequence of SEQ ID NO:2343, and a VL having an amino acid sequence of SEQ ID NO:2344. In one aspect, provided herein is an antibody that binds TRDV2, comprising a heavy chain having an amino acid sequence of SEQ ID NO:2345. In one aspect, provided herein is an antibody that binds TRDV2, comprising a light chain having an amino acid sequence of SEQ ID NO:2346. In one aspect, provided herein is an antibody that binds TRDV2, comprising a heavy chain having an amino acid sequence of SEQ ID NO:2345, and a light chain having an amino acid sequence of SEQ ID NO:2346. In one aspect, provided herein is an antibody that binds TRDV2, comprising a VH having an amino acid sequence having at least 95% identity to an amino acid sequence of SEQ ID NO:2343. In one aspect, provided herein is an antibody that binds TRDV2, comprising a VL having an amino acid sequence having at least 95% identity to an amino acid sequence of SEQ ID NO:2344. In one aspect, provided herein is an antibody that binds TRDV2, comprising a VH having an amino acid sequence having at least 95% identity to an amino acid sequence of SEQ ID NO:2343, and a VL having an amino acid sequence having at least 95% identity to an amino acid sequence of SEQ ID NO:2344. In one aspect, provided herein is an antibody that binds TRDV2, comprising a heavy chain having an amino acid sequence having at least 95% identity to an amino acid sequence of SEQ ID NO:2345. In one aspect, provided herein is an antibody that binds TRDV2, comprising a light chain having an amino acid sequence having at least 95% identity to an amino acid sequence of SEQ ID NO:2346. In one aspect, provided herein is an antibody that binds TRDV2, comprising a heavy chain having an amino acid sequence having at least 95% identity to an amino acid sequence of SEQ ID NO:2345, and a light chain having an amino acid sequence having at least 95% identity to an amino acid sequence of SEQ ID NO:2346.

[0177] In one aspect, provided herein is an antibody that binds TRDV2, comprising: (i) a VH comprising a VH CDR1, a VH CDR2, and a VH CDR3 having an amino acid sequence of SEQ ID NOs:2347, 2348, and 2349, respectively, and (ii) a VL comprising a VL CDR1, VL CDR2, and VL CDR3 having an amino acid sequence of SEQ ID NOs:2350, 2351, and 2352, respectively. In one aspect, provided herein is an antibody that binds TRDV2, comprising: (i) a VH comprising a VH CDR1, a VH CDR2, and a VH CDR3 having an amino acid sequence of SEQ ID NOs:2353, 2354, and 2355, respectively, and (ii) a VL comprising a VL CDR1, VL CDR2, and VL CDR3 having an amino acid sequence of SEQ ID NOs:2356, 2357, and 2358, respectively. In one aspect, provided herein is an antibody that binds TRDV2, comprising: (i) a VH comprising a VH CDR1, a VH CDR2, and a VH CDR3 having an amino acid sequence of SEQ ID NOs:2359, 2360, and 2361, respectively, and (ii) a VL comprising a VL CDR1, VL CDR2, and VL CDR3 having an amino acid sequence of SEQ ID NOs:2362, 2363, and 2364, respectively. In one aspect, provided herein is an antibody that binds TRDV2, comprising: (i) a VH comprising a VH CDR1, a VH CDR2, and a VH CDR3 having an amino acid sequence of SEQ ID NOs:2365, 2366, and 2367, respectively, and (ii) a VL comprising a VL CDR1, VL CDR2, and VL CDR3 having an amino acid sequence of SEQ ID NOs:2368, 2369, and 2370, respectively. In one aspect, provided herein is an antibody that binds TRDV2, comprising: (i) a VH comprising a VH CDR1, a VH CDR2, and a VH CDR3 having an amino acid sequence of SEQ ID NOs:2371, 2372, and 2373, respectively, and (ii) a VL comprising a VL CDR1, VL CDR2, and VL CDR3 having an amino acid sequence of SEQ ID NOs:2374, 2375, and 2376, respectively. In one aspect, provided herein is an antibody that binds TRDV2, comprising: (i) a VH comprising a VH CDR1, a VH CDR2, and a VH CDR3 having an amino acid sequence of a VH CDR1, a VH CDR2, and a VH CDR3, respectively, of a VH having an amino acid sequence of SEQ ID NO:2377; and (ii) a VL comprising a VL CDR1, a VL CDR2, and a VL CDR3 having an amino acid sequence of a VL CDR1, a VL CDR2, and a VL CDR3, respectively, of SEQ ID NO:2378. In one aspect, provided herein is an antibody that binds TRDV2, comprising a VH having an amino acid sequence of SEQ ID NO:2377. In one aspect, provided herein is an antibody that binds TRDV2, comprising a VL having an amino acid sequence of SEQ ID NO:2378. In one aspect, provided herein is an antibody that binds TRDV2, comprising a VH having an amino acid sequence of SEQ ID NO:2377, and a VL having an amino acid sequence of SEQ ID NO:2378. In one aspect, provided herein is an antibody that binds TRDV2, comprising a heavy chain having an amino acid sequence of SEQ ID NO:2379. In one aspect, provided herein is an antibody that binds TRDV2, comprising a light chain having an amino acid sequence of SEQ ID NO:2380. In one aspect, provided herein is an antibody that binds TRDV2, comprising a heavy chain having an amino acid sequence of SEQ ID NO:2379, and a light chain having an amino acid sequence of SEQ ID NO:2380. In one aspect, provided herein is an antibody that binds TRDV2, comprising a VH having an amino acid sequence having at least 95% identity to an amino acid sequence of SEQ ID NO:2377. In one aspect, provided herein is an antibody that binds TRDV2, comprising a VL having an amino acid sequence having at least 95% identity to an amino acid sequence of SEQ ID NO:2378. In one aspect, provided herein is an antibody that binds TRDV2, comprising a VH having an amino acid sequence having at least 95% identity to an amino acid sequence of SEQ ID NO:2377, and a VL having an amino acid sequence having at least 95% identity to an amino acid sequence of SEQ ID NO:2378. In one aspect, provided herein is an antibody that binds TRDV2, comprising a heavy chain having an amino acid sequence having at least 95% identity to an amino acid sequence of SEQ ID NO:2379. In one aspect, provided herein is an antibody that binds TRDV2, comprising a light chain having an amino acid sequence having at least 95% identity to an amino acid sequence of SEQ ID NO:2380. In one aspect, provided herein is an antibody that binds TRDV2, comprising a heavy chain having an amino acid sequence having at least 95% identity to an amino acid sequence of SEQ ID NO:2379, and a light chain having an amino acid sequence having at least 95% identity to an amino acid sequence of SEQ ID NO:2380.

[0178] In one aspect, provided herein is an antibody that binds TRDV2, comprising: (i) a VH comprising a VH CDR1, a VH CDR2, and a VH CDR3 having an amino acid sequence of SEQ ID NOs:2381, 2382, and 2383, respectively, and (ii) a VL comprising a VL CDR1, VL CDR2, and VL CDR3 having an amino acid sequence of SEQ ID NOs:2384, 2385, and 2386, respectively. In one aspect, provided herein is an antibody that binds TRDV2, comprising: (i) a VH comprising a VH CDR1, a VH CDR2, and a VH CDR3 having an amino acid sequence of SEQ ID NOs:2387, 2388, and 2389, respectively, and (ii) a VL comprising a VL CDR1, VL CDR2, and VL CDR3 having an amino acid sequence of SEQ ID NOs:2390, 2391, and 2392, respectively. In one aspect, provided herein is an antibody that binds TRDV2, comprising: (i) a VH comprising a VH CDR1, a VH CDR2, and a VH CDR3 having an amino acid sequence of SEQ ID NOs:2393, 2394, and 2395, respectively, and (ii) a VL comprising a VL CDR1, VL CDR2, and VL CDR3 having an amino acid sequence of SEQ ID NOs:2396, 2397, and 2398, respectively. In one aspect, provided herein is an antibody that binds TRDV2, comprising: (i) a VH comprising a VH CDR1, a VH CDR2, and a VH CDR3 having an amino acid sequence of SEQ ID NOs:2399, 2400, and 2401, respectively, and (ii) a VL comprising a VL CDR1, VL CDR2, and VL CDR3 having an amino acid sequence of SEQ ID NOs:2402, 2403, and 2404, respectively. In one aspect, provided herein is an antibody that binds TRDV2, comprising: (i) a VH comprising a VH CDR1, a VH CDR2, and a VH CDR3 having an amino acid sequence of SEQ ID NOs:2405, 2406, and 2407, respectively, and (ii) a VL comprising a VL CDR1, VL CDR2, and VL CDR3 having an amino acid sequence of SEQ ID NOs:2408, 2409, and 2410, respectively. In one aspect, provided herein is an antibody that binds TRDV2, comprising: (i) a VH comprising a VH CDR1, a VH CDR2, and a VH CDR3 having an amino acid sequence of a VH CDR1, a VH CDR2, and a VH CDR3, respectively, of a VH having an amino acid sequence of SEQ ID NO:2411; and (ii) a VL comprising a VL CDR1, a VL CDR2, and a VL CDR3 having an amino acid sequence of a VL CDR1, a VL CDR2, and a VL CDR3, respectively, of SEQ ID NO:2412. In one aspect, provided herein is an antibody that binds TRDV2, comprising a VH having an amino acid sequence of SEQ ID NO:2411. In one aspect, provided herein is an antibody that binds TRDV2, comprising a VL having an amino acid sequence of SEQ ID NO:2412. In one aspect, provided herein is an antibody that binds TRDV2, comprising a VH having an amino acid sequence of SEQ ID NO:2411, and a VL having an amino acid sequence of SEQ ID NO:2412. In one aspect, provided herein is an antibody that binds TRDV2, comprising a heavy chain having an amino acid sequence of SEQ ID NO:2413. In one aspect, provided herein is an antibody that binds TRDV2, comprising a light chain having an amino acid sequence of SEQ ID NO:2414. In one aspect, provided herein is an antibody that binds TRDV2, comprising a heavy chain having an amino acid sequence of SEQ ID NO:2413, and a light chain having an amino acid sequence of SEQ ID NO:2414. In one aspect, provided herein is an antibody that binds TRDV2, comprising a VH having an amino acid sequence having at least 95% identity to an amino acid sequence of SEQ ID NO:2411. In one aspect, provided herein is an antibody that binds TRDV2, comprising a VL having an amino acid sequence having at least 95% identity to an amino acid sequence of SEQ ID NO:2412. In one aspect, provided herein is an antibody that binds TRDV2, comprising a VH having an amino acid sequence having at least 95% identity to an amino acid sequence of SEQ ID NO:2411, and a VL having an amino acid sequence having at least 95% identity to an amino acid sequence of SEQ ID NO:2412. In one aspect, provided herein is an antibody that binds TRDV2, comprising a heavy chain having an amino acid sequence having at least 95% identity to an amino acid sequence of SEQ ID NO:2413. In one aspect, provided herein is an antibody that binds TRDV2, comprising a light chain having an amino acid sequence having at least 95% identity to an amino acid sequence of SEQ ID NO:2414. In one aspect, provided herein is an antibody that binds TRDV2, comprising a heavy chain having an amino acid sequence having at least 95% identity to an amino acid sequence of SEQ ID NO:2413, and a light chain having an amino acid sequence having at least 95% identity to an amino acid sequence of SEQ ID NO:2414.

[0179] In one aspect, provided herein is an antibody that binds TRDV2, comprising: (i) a VH comprising a VH CDR1, a VH CDR2, and a VH CDR3 having an amino acid sequence of SEQ ID NOs:2415, 2416, and 2417, respectively, and (ii) a VL comprising a VL CDR1, VL CDR2, and VL CDR3 having an amino acid sequence of SEQ ID NOs:2418, 2419, and 2420, respectively. In one aspect, provided herein is an antibody that binds TRDV2, comprising: (i) a VH comprising a VH CDR1, a VH CDR2, and a VH CDR3 having an amino acid sequence of SEQ ID NOs:2421, 2422, and 2423, respectively, and (ii) a VL comprising a VL CDR1, VL CDR2, and VL CDR3 having an amino acid sequence of SEQ ID NOs:2424, 2425, and 2426, respectively. In one aspect, provided herein is an antibody that binds TRDV2, comprising: (i) a VH comprising a VH CDR1, a VH CDR2, and a VH CDR3 having an amino acid sequence of SEQ ID NOs:2427, 2428, and 2429, respectively, and (ii) a VL comprising a VL CDR1, VL CDR2, and VL CDR3 having an amino acid sequence of SEQ ID NOs:2430, 2431, and 2432, respectively. In one aspect, provided herein is an antibody that binds TRDV2, comprising: (i) a VH comprising a VH CDR1, a VH CDR2, and a VH CDR3 having an amino acid sequence of SEQ ID NOs:2433, 2434, and 2435, respectively, and (ii) a VL comprising a VL CDR1, VL CDR2, and VL CDR3 having an amino acid sequence of SEQ ID NOs:2436, 2437, and 2438, respectively. In one aspect, provided herein is an antibody that binds TRDV2, comprising: (i) a VH comprising a VH CDR1, a VH CDR2, and a VH CDR3 having an amino acid sequence of SEQ ID NOs:2439, 2440, and 2441, respectively, and (ii) a VL comprising a VL CDR1, VL CDR2, and VL CDR3 having an amino acid sequence of SEQ ID NOs:2442, 2443, and 2444, respectively. In one aspect, provided herein is an antibody that binds TRDV2, comprising: (i) a VH comprising a VH CDR1, a VH CDR2, and a VH CDR3 having an amino acid sequence of a VH CDR1, a VH CDR2, and a VH CDR3, respectively, of a VH having an amino acid sequence of SEQ ID NO:2445; and (ii) a VL comprising a VL CDR1, a VL CDR2, and a VL CDR3 having an amino acid sequence of a VL CDR1, a VL CDR2, and a VL CDR3, respectively, of SEQ ID NO:2446. In one aspect, provided herein is an antibody that binds TRDV2, comprising a VH having an amino acid sequence of SEQ ID NO:2445. In one aspect, provided herein is an antibody that binds TRDV2, comprising a VL having an amino acid sequence of SEQ ID NO:2446. In one aspect, provided herein is an antibody that binds TRDV2, comprising a VH having an amino acid sequence of SEQ ID NO:2445, and a VL having an amino acid sequence of SEQ ID NO:2446. In one aspect, provided herein is an antibody that binds TRDV2, comprising a heavy chain having an amino acid sequence of SEQ ID NO:2447. In one aspect, provided herein is an antibody that binds TRDV2, comprising a light chain having an amino acid sequence of SEQ ID NO:2448. In one aspect, provided herein is an antibody that binds TRDV2, comprising a heavy chain having an amino acid sequence of SEQ ID NO:2447, and a light chain having an amino acid sequence of SEQ ID NO:2448. In one aspect, provided herein is an antibody that binds TRDV2, comprising a VH having an amino acid sequence having at least 95% identity to an amino acid sequence of SEQ ID NO:2445. In one aspect, provided herein is an antibody that binds TRDV2, comprising a VL having an amino acid sequence having at least 95% identity to an amino acid sequence of SEQ ID NO:2446. In one aspect, provided herein is an antibody that binds TRDV2, comprising a VH having an amino acid sequence having at least 95% identity to an amino acid sequence of SEQ ID NO:2445, and a VL having an amino acid sequence having at least 95% identity to an amino acid sequence of SEQ ID NO:2446. In one aspect, provided herein is an antibody that binds TRDV2, comprising a heavy chain having an amino acid sequence having at least 95% identity to an amino acid sequence of SEQ ID NO:2447. In one aspect, provided herein is an antibody that binds TRDV2, comprising a light chain having an amino acid sequence having at least 95% identity to an amino acid sequence of SEQ ID NO:2448. In one aspect, provided herein is an antibody that binds TRDV2, comprising a heavy chain having an amino acid sequence having at least 95% identity to an amino acid sequence of SEQ ID NO:2447, and a light chain having an amino acid sequence having at least 95% identity to an amino acid sequence of SEQ ID NO:2448.

[0180] In one aspect, provided herein is an antibody that binds TRDV2, comprising: (i) a VH comprising a VH CDR1, a VH CDR2, and a VH CDR3 having an amino acid sequence of SEQ ID NOs:2449, 2450, and 2451, respectively, and (ii) a VL comprising a VL CDR1, VL CDR2, and VL CDR3 having an amino acid sequence of SEQ ID NOs:2452, 2453, and 2454, respectively. In one aspect, provided herein is an antibody that binds TRDV2, comprising: (i) a VH comprising a VH CDR1, a VH CDR2, and a VH CDR3 having an amino acid sequence of SEQ ID NOs:2455, 2456, and 2457, respectively, and (ii) a VL comprising a VL CDR1, VL CDR2, and VL CDR3 having an amino acid sequence of SEQ ID NOs:2458, 2459, and 2460, respectively. In one aspect, provided herein is an antibody that binds TRDV2, comprising: (i) a VH comprising a VH CDR1, a VH CDR2, and a VH CDR3 having an amino acid sequence of SEQ ID NOs:2461, 2462, and 2463, respectively, and (ii) a VL comprising a VL CDR1, VL CDR2, and VL CDR3 having an amino acid sequence of SEQ ID NOs:2464, 2465, and 2466, respectively. In one aspect, provided herein is an antibody that binds TRDV2, comprising: (i) a VH comprising a VH CDR1, a VH CDR2, and a VH CDR3 having an amino acid sequence of SEQ ID NOs:2467, 2468, and 2469, respectively, and (ii) a VL comprising a VL CDR1, VL CDR2, and VL CDR3 having an amino acid sequence of SEQ ID NOs:2470, 2471, and 2472, respectively. In one aspect, provided herein is an antibody that binds TRDV2, comprising: (i) a VH comprising a VH CDR1, a VH CDR2, and a VH CDR3 having an amino acid sequence of SEQ ID NOs:2473, 2474, and 2475, respectively, and (ii) a VL comprising a VL CDR1, VL CDR2, and VL CDR3 having an amino acid sequence of SEQ ID NOs:2476, 2477, and 2478, respectively. In one aspect, provided herein is an antibody that binds TRDV2, comprising: (i) a VH comprising a VH CDR1, a VH CDR2, and a VH CDR3 having an amino acid sequence of a VH CDR1, a VH CDR2, and a VH CDR3, respectively, of a VH having an amino acid sequence of SEQ ID NO:2479; and (ii) a VL comprising a VL CDR1, a VL CDR2, and a VL CDR3 having an amino acid sequence of a VL CDR1, a VL CDR2, and a VL CDR3, respectively, of SEQ ID NO:2480. In one aspect, provided herein is an antibody that binds TRDV2, comprising a VH having an amino acid sequence of SEQ ID NO:2479. In one aspect, provided herein is an antibody that binds TRDV2, comprising a VL having an amino acid sequence of SEQ ID NO:2480. In one aspect, provided herein is an antibody that binds TRDV2, comprising a VH having an amino acid sequence of SEQ ID NO:2479, and a VL having an amino acid sequence of SEQ ID NO:2480. In one aspect, provided herein is an antibody that binds TRDV2, comprising a heavy chain having an amino acid sequence of SEQ ID NO:2481. In one aspect, provided herein is an antibody that binds TRDV2, comprising a light chain having an amino acid sequence of SEQ ID NO:2482. In one aspect, provided herein is an antibody that binds TRDV2, comprising a heavy chain having an amino acid sequence of SEQ ID NO:2481, and a light chain having an amino acid sequence of SEQ ID NO:2482. In one aspect, provided herein is an antibody that binds TRDV2, comprising a VH having an amino acid sequence having at least 95% identity to an amino acid sequence of SEQ ID NO:2479. In one aspect, provided herein is an antibody that binds TRDV2, comprising a VL having an amino acid sequence having at least 95% identity to an amino acid sequence of SEQ ID NO:2480. In one aspect, provided herein is an antibody that binds TRDV2, comprising a VH having an amino acid sequence having at least 95% identity to an amino acid sequence of SEQ ID NO:2479, and a VL having an amino acid sequence having at least 95% identity to an amino acid sequence of SEQ ID NO:2480. In one aspect, provided herein is an antibody that binds TRDV2, comprising a heavy chain having an amino acid sequence having at least 95% identity to an amino acid sequence of SEQ ID NO:2481. In one aspect, provided herein is an antibody that binds TRDV2, comprising a light chain having an amino acid sequence having at least 95% identity to an amino acid sequence of SEQ ID NO:2482. In one aspect, provided herein is an antibody that binds TRDV2, comprising a heavy chain having an amino acid sequence having at least 95% identity to an amino acid sequence of SEQ ID NO:2481, and a light chain having an amino acid sequence having at least 95% identity to an amino acid sequence of SEQ ID NO:2482.

[0181] In one aspect, provided herein is an antibody that binds TRDV2, comprising: (i) a VH comprising a VH CDR1, a VH CDR2, and a VH CDR3 having an amino acid sequence of SEQ ID NOs:2483, 2484, and 2485, respectively, and (ii) a VL comprising a VL CDR1, VL CDR2, and VL CDR3 having an amino acid sequence of SEQ ID NOs:2486, 2487, and 2488, respectively. In one aspect, provided herein is an antibody that binds TRDV2, comprising: (i) a VH comprising a VH CDR1, a VH CDR2, and a VH CDR3 having an amino acid sequence of SEQ ID NOs:2489, 2490, and 2491, respectively, and (ii) a VL comprising a VL CDR1, VL CDR2, and VL CDR3 having an amino acid sequence of SEQ ID NOs:2492, 2493, and 2494, respectively. In one aspect, provided herein is an antibody that binds TRDV2, comprising: (i) a VH comprising a VH CDR1, a VH CDR2, and a VH CDR3 having an amino acid sequence of SEQ ID NOs:2495, 2496, and 2497, respectively, and (ii) a VL comprising a VL CDR1, VL CDR2, and VL CDR3 having an amino acid sequence of SEQ ID NOs:2498, 2499, and 2500, respectively. In one aspect, provided herein is an antibody that binds TRDV2, comprising: (i) a VH comprising a VH CDR1, a VH CDR2, and a VH CDR3 having an amino acid sequence of SEQ ID NOs:2501, 2502, and 2503, respectively, and (ii) a VL comprising a VL CDR1, VL CDR2, and VL CDR3 having an amino acid sequence of SEQ ID NOs:2504, 2505, and 2506, respectively. In one aspect, provided herein is an antibody that binds TRDV2, comprising: (i) a VH comprising a VH CDR1, a VH CDR2, and a VH CDR3 having an amino acid sequence of SEQ ID NOs:2507, 2508, and 2509, respectively, and (ii) a VL comprising a VL CDR1, VL CDR2, and VL CDR3 having an amino acid sequence of SEQ ID NOs:2510, 2511, and 2512, respectively. In one aspect, provided herein is an antibody that binds TRDV2, comprising: (i) a VH comprising a VH CDR1, a VH CDR2, and a VH CDR3 having an amino acid sequence of a VH CDR1, a VH CDR2, and a VH CDR3, respectively, of a VH having an amino acid sequence of SEQ ID NO:2513; and (ii) a VL comprising a VL CDR1, a VL CDR2, and a VL CDR3 having an amino acid sequence of a VL CDR1, a VL CDR2, and a VL CDR3, respectively, of SEQ ID NO:2514. In one aspect, provided herein is an antibody that binds TRDV2, comprising a VH having an amino acid sequence of SEQ ID NO:2513. In one aspect, provided herein is an antibody that binds TRDV2, comprising a VL having an amino acid sequence of SEQ ID NO:2514. In one aspect, provided herein is an antibody that binds TRDV2, comprising a VH having an amino acid sequence of SEQ ID NO:2513, and a VL having an amino acid sequence of SEQ ID NO:2514. In one aspect, provided herein is an antibody that binds TRDV2, comprising a heavy chain having an amino acid sequence of SEQ ID NO:2515. In one aspect, provided herein is an antibody that binds TRDV2, comprising a light chain having an amino acid sequence of SEQ ID NO:2516. In one aspect, provided herein is an antibody that binds TRDV2, comprising a heavy chain having an amino acid sequence of SEQ ID NO:2515, and a light chain having an amino acid sequence of SEQ ID NO:2516. In one aspect, provided herein is an antibody that binds TRDV2, comprising a VH having an amino acid sequence having at least 95% identity to an amino acid sequence of SEQ ID NO:2513. In one aspect, provided herein is an antibody that binds TRDV2, comprising a VL having an amino acid sequence having at least 95% identity to an amino acid sequence of SEQ ID NO:2514. In one aspect, provided herein is an antibody that binds TRDV2, comprising a VH having an amino acid sequence having at least 95% identity to an amino acid sequence of SEQ ID NO:2513, and a VL having an amino acid sequence having at least 95% identity to an amino acid sequence of SEQ ID NO:2514. In one aspect, provided herein is an antibody that binds TRDV2, comprising a heavy chain having an amino acid sequence having at least 95% identity to an amino acid sequence of SEQ ID NO:2515. In one aspect, provided herein is an antibody that binds TRDV2, comprising a light chain having an amino acid sequence having at least 95% identity to an amino acid sequence of SEQ ID NO:2516. In one aspect, provided herein is an antibody that binds TRDV2, comprising a heavy chain having an amino acid sequence having at least 95% identity to an amino acid sequence of SEQ ID NO:2515, and a light chain having an amino acid sequence having at least 95% identity to an amino acid sequence of SEQ ID NO:2516.

[0182] In one aspect, provided herein is an antibody that binds TRDV2, comprising: (i) a VH comprising a VH CDR1, a VH CDR2, and a VH CDR3 having an amino acid sequence of SEQ ID NOs:2517, 2518, and 2519, respectively, and (ii) a VL comprising a VL CDR1, VL CDR2, and VL CDR3 having an amino acid sequence of SEQ ID NOs:2520, 2521, and 2522, respectively. In one aspect, provided herein is an antibody that binds TRDV2, comprising: (i) a VH comprising a VH CDR1, a VH CDR2, and a VH CDR3 having an amino acid sequence of SEQ ID NOs:2523, 2524, and 2525, respectively, and (ii) a VL comprising a VL CDR1, VL CDR2, and VL CDR3 having an amino acid sequence of SEQ ID NOs:2526, 2527, and 2528, respectively. In one aspect, provided herein is an antibody that binds TRDV2, comprising: (i) a VH comprising a VH CDR1, a VH CDR2, and a VH CDR3 having an amino acid sequence of SEQ ID NOs:2529, 2530, and 2531, respectively, and (ii) a VL comprising a VL CDR1, VL CDR2, and VL CDR3 having an amino acid sequence of SEQ ID NOs:2532, 2533, and 2534, respectively. In one aspect, provided herein is an antibody that binds TRDV2, comprising: (i) a VH comprising a VH CDR1, a VH CDR2, and a VH CDR3 having an amino acid sequence of SEQ ID NOs:2535, 2536, and 2537, respectively, and (ii) a VL comprising a VL CDR1, VL CDR2, and VL CDR3 having an amino acid sequence of SEQ ID NOs:2538, 2539, and 2540, respectively. In one aspect, provided herein is an antibody that binds TRDV2, comprising: (i) a VH comprising a VH CDR1, a VH CDR2, and a VH CDR3 having an amino acid sequence of SEQ ID NOs:2541, 2542, and 2543, respectively, and (ii) a VL comprising a VL CDR1, VL CDR2, and VL CDR3 having an amino acid sequence of SEQ ID NOs:2544, 2545, and 2546, respectively. In one aspect, provided herein is an antibody that binds TRDV2, comprising: (i) a VH comprising a VH CDR1, a VH CDR2, and a VH CDR3 having an amino acid sequence of a VH CDR1, a VH CDR2, and a VH CDR3, respectively, of a VH having an amino acid sequence of SEQ ID NO:2547; and (ii) a VL comprising a VL CDR1, a VL CDR2, and a VL CDR3 having an amino acid sequence of a VL CDR1, a VL CDR2, and a VL CDR3, respectively, of SEQ ID NO:2548. In one aspect, provided herein is an antibody that binds TRDV2, comprising a VH having an amino acid sequence of SEQ ID NO:2547. In one aspect, provided herein is an antibody that binds TRDV2, comprising a VL having an amino acid sequence of SEQ ID NO:2548. In one aspect, provided herein is an antibody that binds TRDV2, comprising a VH having an amino acid sequence of SEQ ID NO:2547, and a VL having an amino acid sequence of SEQ ID NO:2548. In one aspect, provided herein is an antibody that binds TRDV2, comprising a heavy chain having an amino acid sequence of SEQ ID NO:2549. In one aspect, provided herein is an antibody that binds TRDV2, comprising a light chain having an amino acid sequence of SEQ ID NO:2550. In one aspect, provided herein is an antibody that binds TRDV2, comprising a heavy chain having an amino acid sequence of SEQ ID NO:2549, and a light chain having an amino acid sequence of SEQ ID NO:2550. In one aspect, provided herein is an antibody that binds TRDV2, comprising a VH having an amino acid sequence having at least 95% identity to an amino acid sequence of SEQ ID NO:2547. In one aspect, provided herein is an antibody that binds TRDV2, comprising a VL having an amino acid sequence having at least 95% identity to an amino acid sequence of SEQ ID NO:2548. In one aspect, provided herein is an antibody that binds TRDV2, comprising a VH having an amino acid sequence having at least 95% identity to an amino acid sequence of SEQ ID NO:2547, and a VL having an amino acid sequence having at least 95% identity to an amino acid sequence of SEQ ID NO:2548. In one aspect, provided herein is an antibody that binds TRDV2, comprising a heavy chain having an amino acid sequence having at least 95% identity to an amino acid sequence of SEQ ID NO:2549. In one aspect, provided herein is an antibody that binds TRDV2, comprising a light chain having an amino acid sequence having at least 95% identity to an amino acid sequence of SEQ ID NO:2550. In one aspect, provided herein is an antibody that binds TRDV2, comprising a heavy chain having an amino acid sequence having at least 95% identity to an amino acid sequence of SEQ ID NO:2549, and a light chain having an amino acid sequence having at least 95% identity to an amino acid sequence of SEQ ID NO:2550.

[0183] In one aspect, provided herein is an antibody that binds TRDV2, comprising: (i) a VH comprising a VH CDR1, a VH CDR2, and a VH CDR3 having an amino acid sequence of SEQ ID NOs:2551, 2552, and 2553, respectively, and (ii) a VL comprising a VL CDR1, VL CDR2, and VL CDR3 having an amino acid sequence of SEQ ID NOs:2554, 2555, and 2556, respectively. In one aspect, provided herein is an antibody that binds TRDV2, comprising: (i) a VH comprising a VH CDR1, a VH CDR2, and a VH CDR3 having an amino acid sequence of SEQ ID NOs:2557, 2558, and 2559, respectively, and (ii) a VL comprising a VL CDR1, VL CDR2, and VL CDR3 having an amino acid sequence of SEQ ID NOs:2560, 2561, and 2562, respectively. In one aspect, provided herein is an antibody that binds TRDV2, comprising: (i) a VH comprising a VH CDR1, a VH CDR2, and a VH CDR3 having an amino acid sequence of SEQ ID NOs:2563, 2564, and 2565, respectively, and (ii) a VL comprising a VL CDR1, VL CDR2, and VL CDR3 having an amino acid sequence of SEQ ID NOs:2566, 2567, and 2568, respectively. In one aspect, provided herein is an antibody that binds TRDV2, comprising: (i) a VH comprising a VH CDR1, a VH CDR2, and a VH CDR3 having an amino acid sequence of SEQ ID NOs:2569, 2570, and 2571, respectively, and (ii) a VL comprising a VL CDR1, VL CDR2, and VL CDR3 having an amino acid sequence of SEQ ID NOs:2572, 2573, and 2574, respectively. In one aspect, provided herein is an antibody that binds TRDV2, comprising: (i) a VH comprising a VH CDR1, a VH CDR2, and a VH CDR3 having an amino acid sequence of SEQ ID NOs:2575, 2576, and 2577, respectively, and (ii) a VL comprising a VL CDR1, VL CDR2, and VL CDR3 having an amino acid sequence of SEQ ID NOs:2578, 2579, and 2580, respectively. In one aspect, provided herein is an antibody that binds TRDV2, comprising: (i) a VH comprising a VH CDR1, a VH CDR2, and a VH CDR3 having an amino acid sequence of a VH CDR1, a VH CDR2, and a VH CDR3, respectively, of a VH having an amino acid sequence of SEQ ID NO:2581; and (ii) a VL comprising a VL CDR1, a VL CDR2, and a VL CDR3 having an amino acid sequence of a VL CDR1, a VL CDR2, and a VL CDR3, respectively, of SEQ ID NO:2582. In one aspect, provided herein is an antibody that binds TRDV2, comprising a VH having an amino acid sequence of SEQ ID NO:2581. In one aspect, provided herein is an antibody that binds TRDV2, comprising a VL having an amino acid sequence of SEQ ID NO:2582. In one aspect, provided herein is an antibody that binds TRDV2, comprising a VH having an amino acid sequence of SEQ ID NO:2581, and a VL having an amino acid sequence of SEQ ID NO:2582. In one aspect, provided herein is an antibody that binds TRDV2, comprising a heavy chain having an amino acid sequence of SEQ ID NO:2583. In one aspect, provided herein is an antibody that binds TRDV2, comprising a light chain having an amino acid sequence of SEQ ID NO:2584. In one aspect, provided herein is an antibody that binds TRDV2, comprising a heavy chain having an amino acid sequence of SEQ ID NO:2583, and a light chain having an amino acid sequence of SEQ ID NO:2584. In one aspect, provided herein is an antibody that binds TRDV2, comprising a VH having an amino acid sequence having at least 95% identity to an amino acid sequence of SEQ ID NO:2581. In one aspect, provided herein is an antibody that binds TRDV2, comprising a VL having an amino acid sequence having at least 95% identity to an amino acid sequence of SEQ ID NO:2582. In one aspect, provided herein is an antibody that binds TRDV2, comprising a VH having an amino acid sequence having at least 95% identity to an amino acid sequence of SEQ ID NO:2581, and a VL having an amino acid sequence having at least 95% identity to an amino acid sequence of SEQ ID NO:2582. In one aspect, provided herein is an antibody that binds TRDV2, comprising a heavy chain having an amino acid sequence having at least 95% identity to an amino acid sequence of SEQ ID NO:2583. In one aspect, provided herein is an antibody that binds TRDV2, comprising a light chain having an amino acid sequence having at least 95% identity to an amino acid sequence of SEQ ID NO:2584. In one aspect, provided herein is an antibody that binds TRDV2, comprising a heavy chain having an amino acid sequence having at least 95% identity to an amino acid sequence of SEQ ID NO:2583, and a light chain having an amino acid sequence having at least 95% identity to an amino acid sequence of SEQ ID NO:2584.

[0184] In one aspect, provided herein is an antibody that binds TRDV2, comprising: (i) a VH comprising a VH CDR1, a VH CDR2, and a VH CDR3 having an amino acid sequence of SEQ ID NOs:2585, 2586, and 2587, respectively, and (ii) a VL comprising a VL CDR1, VL CDR2, and VL CDR3 having an amino acid sequence of SEQ ID NOs:2588, 2589, and 2590, respectively. In one aspect, provided herein is an antibody that binds TRDV2, comprising: (i) a VH comprising a VH CDR1, a VH CDR2, and a VH CDR3 having an amino acid sequence of SEQ ID NOs:2591, 2592, and 2593, respectively, and (ii) a VL comprising a VL CDR1, VL CDR2, and VL CDR3 having an amino acid sequence of SEQ ID NOs:2594, 2595, and 2596, respectively. In one aspect, provided herein is an antibody that binds TRDV2, comprising: (i) a VH comprising a VH CDR1, a VH CDR2, and a VH CDR3 having an amino acid sequence of SEQ ID NOs:2597, 2598, and 2599, respectively, and (ii) a VL comprising a VL CDR1, VL CDR2, and VL CDR3 having an amino acid sequence of SEQ ID NOs:2600, 2601, and 2602, respectively. In one aspect, provided herein is an antibody that binds TRDV2, comprising: (i) a VH comprising a VH CDR1, a VH CDR2, and a VH CDR3 having an amino acid sequence of SEQ ID NOs:2603, 2604, and 2605, respectively, and (ii) a VL comprising a VL CDR1, VL CDR2, and VL CDR3 having an amino acid sequence of SEQ ID NOs:2606, 2607, and 2608, respectively. In one aspect, provided herein is an antibody that binds TRDV2, comprising: (i) a VH comprising a VH CDR1, a VH CDR2, and a VH CDR3 having an amino acid sequence of SEQ ID NOs:2609, 2610, and 2611, respectively, and (ii) a VL comprising a VL CDR1, VL CDR2, and VL CDR3 having an amino acid sequence of SEQ ID NOs:2612, 2613, and 2614, respectively. In one aspect, provided herein is an antibody that binds TRDV2, comprising: (i) a VH comprising a VH CDR1, a VH CDR2, and a VH CDR3 having an amino acid sequence of a VH CDR1, a VH CDR2, and a VH CDR3, respectively, of a VH having an amino acid sequence of SEQ ID NO:2615; and (ii) a VL comprising a VL CDR1, a VL CDR2, and a VL CDR3 having an amino acid sequence of a VL CDR1, a VL CDR2, and a VL CDR3, respectively, of SEQ ID NO:2616. In one aspect, provided herein is an antibody that binds TRDV2, comprising a VH having an amino acid sequence of SEQ ID NO:2615. In one aspect, provided herein is an antibody that binds TRDV2, comprising a VL having an amino acid sequence of SEQ ID NO:2616. In one aspect, provided herein is an antibody that binds TRDV2, comprising a VH having an amino acid sequence of SEQ ID NO:2615, and a VL having an amino acid sequence of SEQ ID NO:2616. In one aspect, provided herein is an antibody that binds TRDV2, comprising a heavy chain having an amino acid sequence of SEQ ID NO:2617. In one aspect, provided herein is an antibody that binds TRDV2, comprising a light chain having an amino acid sequence of SEQ ID NO:2618. In one aspect, provided herein is an antibody that binds TRDV2, comprising a heavy chain having an amino acid sequence of SEQ ID NO:2617, and a light chain having an amino acid sequence of SEQ ID NO:2618. In one aspect, provided herein is an antibody that binds TRDV2, comprising a VH having an amino acid sequence having at least 95% identity to an amino acid sequence of SEQ ID NO:2615. In one aspect, provided herein is an antibody that binds TRDV2, comprising a VL having an amino acid sequence having at least 95% identity to an amino acid sequence of SEQ ID NO:2616. In one aspect, provided herein is an antibody that binds TRDV2, comprising a VH having an amino acid sequence having at least 95% identity to an amino acid sequence of SEQ ID NO:2615, and a VL having an amino acid sequence having at least 95% identity to an amino acid sequence of SEQ ID NO:2616. In one aspect, provided herein is an antibody that binds TRDV2, comprising a heavy chain having an amino acid sequence having at least 95% identity to an amino acid sequence of SEQ ID NO:2617. In one aspect, provided herein is an antibody that binds TRDV2, comprising a light chain having an amino acid sequence having at least 95% identity to an amino acid sequence of SEQ ID NO:2618. In one aspect, provided herein is an antibody that binds TRDV2, comprising a heavy chain having an amino acid sequence having at least 95% identity to an amino acid sequence of SEQ ID NO:2617, and a light chain having an amino acid sequence having at least 95% identity to an amino acid sequence of SEQ ID NO:2618.

[0185] In one aspect, provided herein is an antibody that binds TRDV2, comprising: (i) a VH comprising a VH CDR1, a VH CDR2, and a VH CDR3 having an amino acid sequence of SEQ ID NOs:2619, 2620, and 2621, respectively, and (ii) a VL comprising a VL CDR1, VL CDR2, and VL CDR3 having an amino acid sequence of SEQ ID NOs:2622, 2623, and 2624, respectively. In one aspect, provided herein is an antibody that binds TRDV2, comprising: (i) a VH comprising a VH CDR1, a VH CDR2, and a VH CDR3 having an amino acid sequence of SEQ ID NOs:2625, 2626, and 2627, respectively, and (ii) a VL comprising a VL CDR1, VL CDR2, and VL CDR3 having an amino acid sequence of SEQ ID NOs:2628, 2629, and 2630, respectively. In one aspect, provided herein is an antibody that binds TRDV2, comprising: (i) a VH comprising a VH CDR1, a VH CDR2, and a VH CDR3 having an amino acid sequence of SEQ ID NOs:2631, 2632, and 2633, respectively, and (ii) a VL comprising a VL CDR1, VL CDR2, and VL CDR3 having an amino acid sequence of SEQ ID NOs:2634, 2635, and 2636, respectively. In one aspect, provided herein is an antibody that binds TRDV2, comprising: (i) a VH comprising a VH CDR1, a VH CDR2, and a VH CDR3 having an amino acid sequence of SEQ ID NOs:2637, 2638, and 2639, respectively, and (ii) a VL comprising a VL CDR1, VL CDR2, and VL CDR3 having an amino acid sequence of SEQ ID NOs:2640, 2641, and 2642, respectively. In one aspect, provided herein is an antibody that binds TRDV2, comprising: (i) a VH comprising a VH CDR1, a VH CDR2, and a VH CDR3 having an amino acid sequence of SEQ ID NOs:2643, 2644, and 2645, respectively, and (ii) a VL comprising a VL CDR1, VL CDR2, and VL CDR3 having an amino acid sequence of SEQ ID NOs:2646, 2647, and 2648, respectively. In one aspect, provided herein is an antibody that binds TRDV2, comprising: (i) a VH comprising a VH CDR1, a VH CDR2, and a VH CDR3 having an amino acid sequence of a VH CDR1, a VH CDR2, and a VH CDR3, respectively, of a VH having an amino acid sequence of SEQ ID NO:2649; and (ii) a VL comprising a VL CDR1, a VL CDR2, and a VL CDR3 having an amino acid sequence of a VL CDR1, a VL CDR2, and a VL CDR3, respectively, of SEQ ID NO:2650. In one aspect, provided herein is an antibody that binds TRDV2, comprising a VH having an amino acid sequence of SEQ ID NO:2649. In one aspect, provided herein is an antibody that binds TRDV2, comprising a VL having an amino acid sequence of SEQ ID NO:2650. In one aspect, provided herein is an antibody that binds TRDV2, comprising a VH having an amino acid sequence of SEQ ID NO:2649, and a VL having an amino acid sequence of SEQ ID NO:2650. In one aspect, provided herein is an antibody that binds TRDV2, comprising a heavy chain having an amino acid sequence of SEQ ID NO:2651. In one aspect, provided herein is an antibody that binds TRDV2, comprising a light chain having an amino acid sequence of SEQ ID NO:2652. In one aspect, provided herein is an antibody that binds TRDV2, comprising a heavy chain having an amino acid sequence of SEQ ID NO:2651, and a light chain having an amino acid sequence of SEQ ID NO:2652. In one aspect, provided herein is an antibody that binds TRDV2, comprising a VH having an amino acid sequence having at least 95% identity to an amino acid sequence of SEQ ID NO:2649. In one aspect, provided herein is an antibody that binds TRDV2, comprising a VL having an amino acid sequence having at least 95% identity to an amino acid sequence of SEQ ID NO:2650. In one aspect, provided herein is an antibody that binds TRDV2, comprising a VH having an amino acid sequence having at least 95% identity to an amino acid sequence of SEQ ID NO:2649, and a VL having an amino acid sequence having at least 95% identity to an amino acid sequence of SEQ ID NO:2650. In one aspect, provided herein is an antibody that binds TRDV2, comprising a heavy chain having an amino acid sequence having at least 95% identity to an amino acid sequence of SEQ ID NO:2651. In one aspect, provided herein is an antibody that binds TRDV2, comprising a light chain having an amino acid sequence having at least 95% identity to an amino acid sequence of SEQ ID NO:2652. In one aspect, provided herein is an antibody that binds TRDV2, comprising a heavy chain having an amino acid sequence having at least 95% identity to an amino acid sequence of SEQ ID NO:2651, and a light chain having an amino acid sequence having at least 95% identity to an amino acid sequence of SEQ ID NO:2652.

[0186] In one aspect, provided herein is an antibody that binds TRDV2, comprising: (i) a VH comprising a VH CDR1, a VH CDR2, and a VH CDR3 having an amino acid sequence of SEQ ID NOs:2653, 2654, and 2655, respectively, and (ii) a VL comprising a VL CDR1, VL CDR2, and VL CDR3 having an amino acid sequence of SEQ ID NOs:2656, 2657, and 2658, respectively. In one aspect, provided herein is an antibody that binds TRDV2, comprising: (i) a VH comprising a VH CDR1, a VH CDR2, and a VH CDR3 having an amino acid sequence of SEQ ID NOs:2659, 2660, and 2661, respectively, and (ii) a VL comprising a VL CDR1, VL CDR2, and VL CDR3 having an amino acid sequence of SEQ ID NOs:2662, 2663, and 2664, respectively. In one aspect, provided herein is an antibody that binds TRDV2, comprising: (i) a VH comprising a VH CDR1, a VH CDR2, and a VH CDR3 having an amino acid sequence of SEQ ID NOs:2665, 2666, and 2667, respectively, and (ii) a VL comprising a VL CDR1, VL CDR2, and VL CDR3 having an amino acid sequence of SEQ ID NOs:2668, 2669, and 2670, respectively. In one aspect, provided herein is an antibody that binds TRDV2, comprising: (i) a VH comprising a VH CDR1, a VH CDR2, and a VH CDR3 having an amino acid sequence of SEQ ID NOs:2671, 2672, and 2673, respectively, and (ii) a VL comprising a VL CDR1, VL CDR2, and VL CDR3 having an amino acid sequence of SEQ ID NOs:2674, 2675, and 2676, respectively. In one aspect, provided herein is an antibody that binds TRDV2, comprising: (i) a VH comprising a VH CDR1, a VH CDR2, and a VH CDR3 having an amino acid sequence of SEQ ID NOs:2677, 2678, and 2679, respectively, and (ii) a VL comprising a VL CDR1, VL CDR2, and VL CDR3 having an amino acid sequence of SEQ ID NOs:2680, 2681, and 2682, respectively. In one aspect, provided herein is an antibody that binds TRDV2, comprising: (i) a VH comprising a VH CDR1, a VH CDR2, and a VH CDR3 having an amino acid sequence of a VH CDR1, a VH CDR2, and a VH CDR3, respectively, of a VH having an amino acid sequence of SEQ ID NO:2683; and (ii) a VL comprising a VL CDR1, a VL CDR2, and a VL CDR3 having an amino acid sequence of a VL CDR1, a VL CDR2, and a VL CDR3, respectively, of SEQ ID NO:2684. In one aspect, provided herein is an antibody that binds TRDV2, comprising a VH having an amino acid sequence of SEQ ID NO:2683. In one aspect, provided herein is an antibody that binds TRDV2, comprising a VL having an amino acid sequence of SEQ ID NO:2684. In one aspect, provided herein is an antibody that binds TRDV2, comprising a VH having an amino acid sequence of SEQ ID NO:2683, and a VL having an amino acid sequence of SEQ ID NO:2684. In one aspect, provided herein is an antibody that binds TRDV2, comprising a heavy chain having an amino acid sequence of SEQ ID NO:2685. In one aspect, provided herein is an antibody that binds TRDV2, comprising a light chain having an amino acid sequence of SEQ ID NO:2686. In one aspect, provided herein is an antibody that binds TRDV2, comprising a heavy chain having an amino acid sequence of SEQ ID NO:2685, and a light chain having an amino acid sequence of SEQ ID NO:2686. In one aspect, provided herein is an antibody that binds TRDV2, comprising a VH having an amino acid sequence having at least 95% identity to an amino acid sequence of SEQ ID NO:2683. In one aspect, provided herein is an antibody that binds TRDV2, comprising a VL having an amino acid sequence having at least 95% identity to an amino acid sequence of SEQ ID NO:2684. In one aspect, provided herein is an antibody that binds TRDV2, comprising a VH having an amino acid sequence having at least 95% identity to an amino acid sequence of SEQ ID NO:2683, and a VL having an amino acid sequence having at least 95% identity to an amino acid sequence of SEQ ID NO:2684. In one aspect, provided herein is an antibody that binds TRDV2, comprising a heavy chain having an amino acid sequence having at least 95% identity to an amino acid sequence of SEQ ID NO:2685. In one aspect, provided herein is an antibody that binds TRDV2, comprising a light chain having an amino acid sequence having at least 95% identity to an amino acid sequence of SEQ ID NO:2686. In one aspect, provided herein is an antibody that binds TRDV2, comprising a heavy chain having an amino acid sequence having at least 95% identity to an amino acid sequence of SEQ ID NO:2685, and a light chain having an amino acid sequence having at least 95% identity to an amino acid sequence of SEQ ID NO:266.

[0187] In one aspect, provided herein is an antibody that binds TRDV2, comprising: (i) a VH comprising a VH CDR1, a VH CDR2, and a VH CDR3 having an amino acid sequence of SEQ ID NOs:2687, 2688, and 2689, respectively, and (ii) a VL comprising a VL CDR1, VL CDR2, and VL CDR3 having an amino acid sequence of SEQ ID NOs:2690, 2691, and 2692, respectively. In one aspect, provided herein is an antibody that binds TRDV2, comprising: (i) a VH comprising a VH CDR1, a VH CDR2, and a VH CDR3 having an amino acid sequence of SEQ ID NOs:2693, 2694, and 2695, respectively, and (ii) a VL comprising a VL CDR1, VL CDR2, and VL CDR3 having an amino acid sequence of SEQ ID NOs:2696, 2697, and 2698, respectively. In one aspect, provided herein is an antibody that binds TRDV2, comprising: (i) a VH comprising a VH CDR1, a VH CDR2, and a VH CDR3 having an amino acid sequence of SEQ ID NOs:2699, 2700, and 2701, respectively, and (ii) a VL comprising a VL CDR1, VL CDR2, and VL CDR3 having an amino acid sequence of SEQ ID NOs:2702, 2703, and 2704, respectively. In one aspect, provided herein is an antibody that binds TRDV2, comprising: (i) a VH comprising a VH CDR1, a VH CDR2, and a VH CDR3 having an amino acid sequence of SEQ ID NOs:2705, 2706, and 2707, respectively, and (ii) a VL comprising a VL CDR1, VL CDR2, and VL CDR3 having an amino acid sequence of SEQ ID NOs:2708, 2709, and 2710, respectively. In one aspect, provided herein is an antibody that binds TRDV2, comprising: (i) a VH comprising a VH CDR1, a VH CDR2, and a VH CDR3 having an amino acid sequence of SEQ ID NOs:2711, 2712, and 2713, respectively, and (ii) a VL comprising a VL CDR1, VL CDR2, and VL CDR3 having an amino acid sequence of SEQ ID NOs:2714, 2715, and 2716, respectively. In one aspect, provided herein is an antibody that binds TRDV2, comprising: (i) a VH comprising a VH CDR1, a VH CDR2, and a VH CDR3 having an amino acid sequence of a VH CDR1, a VH CDR2, and a VH CDR3, respectively, of a VH having an amino acid sequence of SEQ ID NO:2717; and (ii) a VL comprising a VL CDR1, a VL CDR2, and a VL CDR3 having an amino acid sequence of a VL CDR1, a VL CDR2, and a VL CDR3, respectively, of SEQ ID NO:2718. In one aspect, provided herein is an antibody that binds TRDV2, comprising a VH having an amino acid sequence of SEQ ID NO:2717. In one aspect, provided herein is an antibody that binds TRDV2, comprising a VL having an amino acid sequence of SEQ ID NO:2718. In one aspect, provided herein is an antibody that binds TRDV2, comprising a VH having an amino acid sequence of SEQ ID NO:2717, and a VL having an amino acid sequence of SEQ ID NO:2718. In one aspect, provided herein is an antibody that binds TRDV2, comprising a heavy chain having an amino acid sequence of SEQ ID NO:2719. In one aspect, provided herein is an antibody that binds TRDV2, comprising a light chain having an amino acid sequence of SEQ ID NO:2720. In one aspect, provided herein is an antibody that binds TRDV2, comprising a heavy chain having an amino acid sequence of SEQ ID NO:2719, and a light chain having an amino acid sequence of SEQ ID NO:2720. In one aspect, provided herein is an antibody that binds TRDV2, comprising a VH having an amino acid sequence having at least 95% identity to an amino acid sequence of SEQ ID NO:2717. In one aspect, provided herein is an antibody that binds TRDV2, comprising a VL having an amino acid sequence having at least 95% identity to an amino acid sequence of SEQ ID NO:2718. In one aspect, provided herein is an antibody that binds TRDV2, comprising a VH having an amino acid sequence having at least 95% identity to an amino acid sequence of SEQ ID NO:2717, and a VL having an amino acid sequence having at least 95% identity to an amino acid sequence of SEQ ID NO:2718. In one aspect, provided herein is an antibody that binds TRDV2, comprising a heavy chain having an amino acid sequence having at least 95% identity to an amino acid sequence of SEQ ID NO:2719. In one aspect, provided herein is an antibody that binds TRDV2, comprising a light chain having an amino acid sequence having at least 95% identity to an amino acid sequence of SEQ ID NO:2720. In one aspect, provided herein is an antibody that binds TRDV2, comprising a heavy chain having an amino acid sequence having at least 95% identity to an amino acid sequence of SEQ ID NO:2719, and a light chain having an amino acid sequence having at least 95% identity to an amino acid sequence of SEQ ID NO:2720.

[0188] In one aspect, provided herein is an antibody that binds TRDV2, comprising: (i) a VH comprising a VH CDR1, a VH CDR2, and a VH CDR3 having an amino acid sequence of SEQ ID NOs:2721, 2722, and 2723, respectively, and (ii) a VL comprising a VL CDR1, VL CDR2, and VL CDR3 having an amino acid sequence of SEQ ID NOs:2724, 2725, and 2726, respectively. In one aspect, provided herein is an antibody that binds TRDV2, comprising: (i) a VH comprising a VH CDR1, a VH CDR2, and a VH CDR3 having an amino acid sequence of SEQ ID NOs:2727, 2728, and 2729, respectively, and (ii) a VL comprising a VL CDR1, VL CDR2, and VL CDR3 having an amino acid sequence of SEQ ID NOs:2730, 2731, and 2732, respectively. In one aspect, provided herein is an antibody that binds TRDV2, comprising: (i) a VH comprising a VH CDR1, a VH CDR2, and a VH CDR3 having an amino acid sequence of SEQ ID NOs:2733, 2734, and 2735, respectively, and (ii) a VL comprising a VL CDR1, VL CDR2, and VL CDR3 having an amino acid sequence of SEQ ID NOs:2736, 2737, and 2738, respectively. In one aspect, provided herein is an antibody that binds TRDV2, comprising: (i) a VH comprising a VH CDR1, a VH CDR2, and a VH CDR3 having an amino acid sequence of SEQ ID NOs:2739, 2740, and 2741, respectively, and (ii) a VL comprising a VL CDR1, VL CDR2, and VL CDR3 having an amino acid sequence of SEQ ID NOs:2742, 2743, and 2744, respectively. In one aspect, provided herein is an antibody that binds TRDV2, comprising: (i) a VH comprising a VH CDR1, a VH CDR2, and a VH CDR3 having an amino acid sequence of SEQ ID NOs:2745, 2746, and 2747, respectively, and (ii) a VL comprising a VL CDR1, VL CDR2, and VL CDR3 having an amino acid sequence of SEQ ID NOs:2748, 2749, and 2750, respectively. In one aspect, provided herein is an antibody that binds TRDV2, comprising: (i) a VH comprising a VH CDR1, a VH CDR2, and a VH CDR3 having an amino acid sequence of a VH CDR1, a VH CDR2, and a VH CDR3, respectively, of a VH having an amino acid sequence of SEQ ID NO:2751; and (ii) a VL comprising a VL CDR1, a VL CDR2, and a VL CDR3 having an amino acid sequence of a VL CDR1, a VL CDR2, and a VL CDR3, respectively, of SEQ ID NO:2752. In one aspect, provided herein is an antibody that binds TRDV2, comprising a VH having an amino acid sequence of SEQ ID NO:2751. In one aspect, provided herein is an antibody that binds TRDV2, comprising a VL having an amino acid sequence of SEQ ID NO:2752. In one aspect, provided herein is an antibody that binds TRDV2, comprising a VH having an amino acid sequence of SEQ ID NO:2751, and a VL having an amino acid sequence of SEQ ID NO:2752. In one aspect, provided herein is an antibody that binds TRDV2, comprising a heavy chain having an amino acid sequence of SEQ ID NO:2753. In one aspect, provided herein is an antibody that binds TRDV2, comprising a light chain having an amino acid sequence of SEQ ID NO:2754. In one aspect, provided herein is an antibody that binds TRDV2, comprising a heavy chain having an amino acid sequence of SEQ ID NO:2753, and a light chain having an amino acid sequence of SEQ ID NO:2754. In one aspect, provided herein is an antibody that binds TRDV2, comprising a VH having an amino acid sequence having at least 95% identity to an amino acid sequence of SEQ ID NO:2751. In one aspect, provided herein is an antibody that binds TRDV2, comprising a VL having an amino acid sequence having at least 95% identity to an amino acid sequence of SEQ ID NO:2752. In one aspect, provided herein is an antibody that binds TRDV2, comprising a VH having an amino acid sequence having at least 95% identity to an amino acid sequence of SEQ ID NO:2751, and a VL having an amino acid sequence having at least 95% identity to an amino acid sequence of SEQ ID NO:2752. In one aspect, provided herein is an antibody that binds TRDV2, comprising a heavy chain having an amino acid sequence having at least 95% identity to an amino acid sequence of SEQ ID NO:2753. In one aspect, provided herein is an antibody that binds TRDV2, comprising a light chain having an amino acid sequence having at least 95% identity to an amino acid sequence of SEQ ID NO:2754. In one aspect, provided herein is an antibody that binds TRDV2, comprising a heavy chain having an amino acid sequence having at least 95% identity to an amino acid sequence of SEQ ID NO:2753, and a light chain having an amino acid sequence having at least 95% identity to an amino acid sequence of SEQ ID NO:2754.

[0189] In one aspect, provided herein is an antibody that binds TRDV2, comprising: (i) a VH comprising a VH CDR1, a VH CDR2, and a VH CDR3 having an amino acid sequence of SEQ ID NOs:2755, 2756, and 2757, respectively, and (ii) a VL comprising a VL CDR1, VL CDR2, and VL CDR3 having an amino acid sequence of SEQ ID NOs:2758, 2759, and 2760, respectively. In one aspect, provided herein is an antibody that binds TRDV2, comprising: (i) a VH comprising a VH CDR1, a VH CDR2, and a VH CDR3 having an amino acid sequence of SEQ ID NOs:2761, 2762, and 2763, respectively, and (ii) a VL comprising a VL CDR1, VL CDR2, and VL CDR3 having an amino acid sequence of SEQ ID NOs:2764, 2765, and 2766, respectively. In one aspect, provided herein is an antibody that binds TRDV2, comprising: (i) a VH comprising a VH CDR1, a VH CDR2, and a VH CDR3 having an amino acid sequence of SEQ ID NOs:2767, 2768, and 2769, respectively, and (ii) a VL comprising a VL CDR1, VL CDR2, and VL CDR3 having an amino acid sequence of SEQ ID NOs:2770, 2771, and 2772, respectively. In one aspect, provided herein is an antibody that binds TRDV2, comprising: (i) a VH comprising a VH CDR1, a VH CDR2, and a VH CDR3 having an amino acid sequence of SEQ ID NOs:2773, 2774, and 2775, respectively, and (ii) a VL comprising a VL CDR1, VL CDR2, and VL CDR3 having an amino acid sequence of SEQ ID NOs:2776, 2777, and 2778, respectively. In one aspect, provided herein is an antibody that binds TRDV2, comprising: (i) a VH comprising a VH CDR1, a VH CDR2, and a VH CDR3 having an amino acid sequence of SEQ ID NOs:2779, 2780, and 2781, respectively, and (ii) a VL comprising a VL CDR1, VL CDR2, and VL CDR3 having an amino acid sequence of SEQ ID NOs:2782, 2783, and 2784, respectively. In one aspect, provided herein is an antibody that binds TRDV2, comprising: (i) a VH comprising a VH CDR1, a VH CDR2, and a VH CDR3 having an amino acid sequence of a VH CDR1, a VH CDR2, and a VH CDR3, respectively, of a VH having an amino acid sequence of SEQ ID NO:2785; and (ii) a VL comprising a VL CDR1, a VL CDR2, and a VL CDR3 having an amino acid sequence of a VL CDR1, a VL CDR2, and a VL CDR3, respectively, of SEQ ID NO:2786. In one aspect, provided herein is an antibody that binds TRDV2, comprising a VH having an amino acid sequence of SEQ ID NO:2785. In one aspect, provided herein is an antibody that binds TRDV2, comprising a VL having an amino acid sequence of SEQ ID NO:2786. In one aspect, provided herein is an antibody that binds TRDV2, comprising a VH having an amino acid sequence of SEQ ID NO:2785, and a VL having an amino acid sequence of SEQ ID NO:2786. In one aspect, provided herein is an antibody that binds TRDV2, comprising a heavy chain having an amino acid sequence of SEQ ID NO:2787. In one aspect, provided herein is an antibody that binds TRDV2, comprising a light chain having an amino acid sequence of SEQ ID NO:2788. In one aspect, provided herein is an antibody that binds TRDV2, comprising a heavy chain having an amino acid sequence of SEQ ID NO:2787, and a light chain having an amino acid sequence of SEQ ID NO:2788. In one aspect, provided herein is an antibody that binds TRDV2, comprising a VH having an amino acid sequence having at least 95% identity to an amino acid sequence of SEQ ID NO:2785. In one aspect, provided herein is an antibody that binds TRDV2, comprising a VL having an amino acid sequence having at least 95% identity to an amino acid sequence of SEQ ID NO:2786. In one aspect, provided herein is an antibody that binds TRDV2, comprising a VH having an amino acid sequence having at least 95% identity to an amino acid sequence of SEQ ID NO:2785, and a VL having an amino acid sequence having at least 95% identity to an amino acid sequence of SEQ ID NO:2786. In one aspect, provided herein is an antibody that binds TRDV2, comprising a heavy chain having an amino acid sequence having at least 95% identity to an amino acid sequence of SEQ ID NO:2787. In one aspect, provided herein is an antibody that binds TRDV2, comprising a light chain having an amino acid sequence having at least 95% identity to an amino acid sequence of SEQ ID NO:2788. In one aspect, provided herein is an antibody that binds TRDV2, comprising a heavy chain having an amino acid sequence having at least 95% identity to an amino acid sequence of SEQ ID NO:2787, and a light chain having an amino acid sequence having at least 95% identity to an amino acid sequence of SEQ ID NO:2788.

[0190] In one aspect, provided herein is an antibody that binds TRDV2, comprising: (i) a VH comprising a VH CDR1, a VH CDR2, and a VH CDR3 having an amino acid sequence of SEQ ID NOs:2789, 2790, and 2791, respectively, and (ii) a VL comprising a VL CDR1, VL CDR2, and VL CDR3 having an amino acid sequence of SEQ ID NOs:2792, 2793, and 2794, respectively. In one aspect, provided herein is an antibody that binds TRDV2, comprising: (i) a VH comprising a VH CDR1, a VH CDR2, and a VH CDR3 having an amino acid sequence of SEQ ID NOs:2795, 2796, and 2797, respectively, and (ii) a VL comprising a VL CDR1, VL CDR2, and VL CDR3 having an amino acid sequence of SEQ ID NOs:2798, 2799, and 2800, respectively. In one aspect, provided herein is an antibody that binds TRDV2, comprising: (i) a VH comprising a VH CDR1, a VH CDR2, and a VH CDR3 having an amino acid sequence of SEQ ID NOs:2801, 2802, and 2803, respectively, and (ii) a VL comprising a VL CDR1, VL CDR2, and VL CDR3 having an amino acid sequence of SEQ ID NOs:2804, 2805, and 2806, respectively. In one aspect, provided herein is an antibody that binds TRDV2, comprising: (i) a VH comprising a VH CDR1, a VH CDR2, and a VH CDR3 having an amino acid sequence of SEQ ID NOs:2807, 2808, and 2809, respectively, and (ii) a VL comprising a VL CDR1, VL CDR2, and VL CDR3 having an amino acid sequence of SEQ ID NOs:2810, 2811, and 2812, respectively. In one aspect, provided herein is an antibody that binds TRDV2, comprising: (i) a VH comprising a VH CDR1, a VH CDR2, and a VH CDR3 having an amino acid sequence of SEQ ID NOs:2813, 2814, and 2815, respectively, and (ii) a VL comprising a VL CDR1, VL CDR2, and VL CDR3 having an amino acid sequence of SEQ ID NOs:2816, 2817, and 2818, respectively. In one aspect, provided herein is an antibody that binds TRDV2, comprising: (i) a VH comprising a VH CDR1, a VH CDR2, and a VH CDR3 having an amino acid sequence of a VH CDR1, a VH CDR2, and a VH CDR3, respectively, of a VH having an amino acid sequence of SEQ ID NO:2819; and (ii) a VL comprising a VL CDR1, a VL CDR2, and a VL CDR3 having an amino acid sequence of a VL CDR1, a VL CDR2, and a VL CDR3, respectively, of SEQ ID NO:2820. In one aspect, provided herein is an antibody that binds TRDV2, comprising a VH having an amino acid sequence of SEQ ID NO:2819. In one aspect, provided herein is an antibody that binds TRDV2, comprising a VL having an amino acid sequence of SEQ ID NO:2820. In one aspect, provided herein is an antibody that binds TRDV2, comprising a VH having an amino acid sequence of SEQ ID NO:2819, and a VL having an amino acid sequence of SEQ ID NO:2820. In one aspect, provided herein is an antibody that binds TRDV2, comprising a heavy chain having an amino acid sequence of SEQ ID NO:2821. In one aspect, provided herein is an antibody that binds TRDV2, comprising a light chain having an amino acid sequence of SEQ ID NO:2822. In one aspect, provided herein is an antibody that binds TRDV2, comprising a heavy chain having an amino acid sequence of SEQ ID NO:2821, and a light chain having an amino acid sequence of SEQ ID NO:2822. In one aspect, provided herein is an antibody that binds TRDV2, comprising a VH having an amino acid sequence having at least 95% identity to an amino acid sequence of SEQ ID NO:2819. In one aspect, provided herein is an antibody that binds TRDV2, comprising a VL having an amino acid sequence having at least 95% identity to an amino acid sequence of SEQ ID NO:2820. In one aspect, provided herein is an antibody that binds TRDV2, comprising a VH having an amino acid sequence having at least 95% identity to an amino acid sequence of SEQ ID NO:2819, and a VL having an amino acid sequence having at least 95% identity to an amino acid sequence of SEQ ID NO:2820. In one aspect, provided herein is an antibody that binds TRDV2, comprising a heavy chain having an amino acid sequence having at least 95% identity to an amino acid sequence of SEQ ID NO:2821. In one aspect, provided herein is an antibody that binds TRDV2, comprising a light chain having an amino acid sequence having at least 95% identity to an amino acid sequence of SEQ ID NO:2822. In one aspect, provided herein is an antibody that binds TRDV2, comprising a heavy chain having an amino acid sequence having at least 95% identity to an amino acid sequence of SEQ ID NO:2821, and a light chain having an amino acid sequence having at least 95% identity to an amino acid sequence of SEQ ID NO:2822.

[0191] In one aspect, provided herein is an antibody that binds TRDV2, comprising: (i) a VH comprising a VH CDR1, a VH CDR2, and a VH CDR3 having an amino acid sequence of SEQ ID NOs:2823, 2824, and 2825, respectively, and (ii) a VL comprising a VL CDR1, VL CDR2, and VL CDR3 having an amino acid sequence of SEQ ID NOs:2826, 2827, and 2828, respectively. In one aspect, provided herein is an antibody that binds TRDV2, comprising: (i) a VH comprising a VH CDR1, a VH CDR2, and a VH CDR3 having an amino acid sequence of SEQ ID NOs:2829, 2830, and 2831, respectively, and (ii) a VL comprising a VL CDR1, VL CDR2, and VL CDR3 having an amino acid sequence of SEQ ID NOs:2832, 2833, and 2834, respectively. In one aspect, provided herein is an antibody that binds TRDV2, comprising: (i) a VH comprising a VH CDR1, a VH CDR2, and a VH CDR3 having an amino acid sequence of SEQ ID NOs:2835, 2836, and 2837, respectively, and (ii) a VL comprising a VL CDR1, VL CDR2, and VL CDR3 having an amino acid sequence of SEQ ID NOs:2838, 2839, and 2840, respectively. In one aspect, provided herein is an antibody that binds TRDV2, comprising: (i) a VH comprising a VH CDR1, a VH CDR2, and a VH CDR3 having an amino acid sequence of SEQ ID NOs:2841, 2842, and 2843, respectively, and (ii) a VL comprising a VL CDR1, VL CDR2, and VL CDR3 having an amino acid sequence of SEQ ID NOs:2844, 2845, and 2846, respectively. In one aspect, provided herein is an antibody that binds TRDV2, comprising: (i) a VH comprising a VH CDR1, a VH CDR2, and a VH CDR3 having an amino acid sequence of SEQ ID NOs:2847, 2848, and 2849, respectively, and (ii) a VL comprising a VL CDR1, VL CDR2, and VL CDR3 having an amino acid sequence of SEQ ID NOs:2850, 2851, and 2852, respectively. In one aspect, provided herein is an antibody that binds TRDV2, comprising: (i) a VH comprising a VH CDR1, a VH CDR2, and a VH CDR3 having an amino acid sequence of a VH CDR1, a VH CDR2, and a VH CDR3, respectively, of a VH having an amino acid sequence of SEQ ID NO:2853; and (ii) a VL comprising a VL CDR1, a VL CDR2, and a VL CDR3 having an amino acid sequence of a VL CDR1, a VL CDR2, and a VL CDR3, respectively, of SEQ ID NO:2854. In one aspect, provided herein is an antibody that binds TRDV2, comprising a VH having an amino acid sequence of SEQ ID NO:2853. In one aspect, provided herein is an antibody that binds TRDV2, comprising a VL having an amino acid sequence of SEQ ID NO:2854. In one aspect, provided herein is an antibody that binds TRDV2, comprising a VH having an amino acid sequence of SEQ ID NO:2853, and a VL having an amino acid sequence of SEQ ID NO:2854. In one aspect, provided herein is an antibody that binds TRDV2, comprising a heavy chain having an amino acid sequence of SEQ ID NO:2855. In one aspect, provided herein is an antibody that binds TRDV2, comprising a light chain having an amino acid sequence of SEQ ID NO:2856. In one aspect, provided herein is an antibody that binds TRDV2, comprising a heavy chain having an amino acid sequence of SEQ ID NO:2855, and a light chain having an amino acid sequence of SEQ ID NO:2856. In one aspect, provided herein is an antibody that binds TRDV2, comprising a VH having an amino acid sequence having at least 95% identity to an amino acid sequence of SEQ ID NO:2853. In one aspect, provided herein is an antibody that binds TRDV2, comprising a VL having an amino acid sequence having at least 95% identity to an amino acid sequence of SEQ ID NO:2854. In one aspect, provided herein is an antibody that binds TRDV2, comprising a VH having an amino acid sequence having at least 95% identity to an amino acid sequence of SEQ ID NO:2853, and a VL having an amino acid sequence having at least 95% identity to an amino acid sequence of SEQ ID NO:2854. In one aspect, provided herein is an antibody that binds TRDV2, comprising a heavy chain having an amino acid sequence having at least 95% identity to an amino acid sequence of SEQ ID NO:2855. In one aspect, provided herein is an antibody that binds TRDV2, comprising a light chain having an amino acid sequence having at least 95% identity to an amino acid sequence of SEQ ID NO:2856. In one aspect, provided herein is an antibody that binds TRDV2, comprising a heavy chain having an amino acid sequence having at least 95% identity to an amino acid sequence of SEQ ID NO:2855, and a light chain having an amino acid sequence having at least 95% identity to an amino acid sequence of SEQ ID NO:2856.

[0192] In one aspect, provided herein is an antibody that binds TRDV2, comprising: (i) a VH comprising a VH CDR1, a VH CDR2, and a VH CDR3 having an amino acid sequence of SEQ ID NOs:2857, 2858, and 2859, respectively, and (ii) a VL comprising a VL CDR1, VL CDR2, and VL CDR3 having an amino acid sequence of SEQ ID NOs:2860, 2861, and 2862, respectively. In one aspect, provided herein is an antibody that binds TRDV2, comprising: (i) a VH comprising a VH CDR1, a VH CDR2, and a VH CDR3 having an amino acid sequence of SEQ ID NOs:2863, 2864, and 2865, respectively, and (ii) a VL comprising a VL CDR1, VL CDR2, and VL CDR3 having an amino acid sequence of SEQ ID NOs:2866, 2867, and 2868, respectively. In one aspect, provided herein is an antibody that binds TRDV2, comprising: (i) a VH comprising a VH CDR1, a VH CDR2, and a VH CDR3 having an amino acid sequence of SEQ ID NOs:2869, 2870, and 2871, respectively, and (ii) a VL comprising a VL CDR1, VL CDR2, and VL CDR3 having an amino acid sequence of SEQ ID NOs:2872, 2873, and 2874, respectively. In one aspect, provided herein is an antibody that binds TRDV2, comprising: (i) a VH comprising a VH CDR1, a VH CDR2, and a VH CDR3 having an amino acid sequence of SEQ ID NOs:2875, 2876, and 2877, respectively, and (ii) a VL comprising a VL CDR1, VL CDR2, and VL CDR3 having an amino acid sequence of SEQ ID NOs:2878, 2879, and 2880, respectively. In one aspect, provided herein is an antibody that binds TRDV2, comprising: (i) a VH comprising a VH CDR1, a VH CDR2, and a VH CDR3 having an amino acid sequence of SEQ ID NOs:2881, 2882, and 2883, respectively, and (ii) a VL comprising a VL CDR1, VL CDR2, and VL CDR3 having an amino acid sequence of SEQ ID NOs:2884, 2885, and 2886, respectively. In one aspect, provided herein is an antibody that binds TRDV2, comprising: (i) a VH comprising a VH CDR1, a VH CDR2, and a VH CDR3 having an amino acid sequence of a VH CDR1, a VH CDR2, and a VH CDR3, respectively, of a VH having an amino acid sequence of SEQ ID NO:2887; and (ii) a VL comprising a VL CDR1, a VL CDR2, and a VL CDR3 having an amino acid sequence of a VL CDR1, a VL CDR2, and a VL CDR3, respectively, of SEQ ID NO:2888. In one aspect, provided herein is an antibody that binds TRDV2, comprising a VH having an amino acid sequence of SEQ ID NO:2887. In one aspect, provided herein is an antibody that binds TRDV2, comprising a VL having an amino acid sequence of SEQ ID NO:2888. In one aspect, provided herein is an antibody that binds TRDV2, comprising a VH having an amino acid sequence of SEQ ID NO:2887, and a VL having an amino acid sequence of SEQ ID NO:2888. In one aspect, provided herein is an antibody that binds TRDV2, comprising a heavy chain having an amino acid sequence of SEQ ID NO:2889. In one aspect, provided herein is an antibody that binds TRDV2, comprising a light chain having an amino acid sequence of SEQ ID NO:2890. In one aspect, provided herein is an antibody that binds TRDV2, comprising a heavy chain having an amino acid sequence of SEQ ID NO:2889, and a light chain having an amino acid sequence of SEQ ID NO:2890. In one aspect, provided herein is an antibody that binds TRDV2, comprising a VH having an amino acid sequence having at least 95% identity to an amino acid sequence of SEQ ID NO:2887. In one aspect, provided herein is an antibody that binds TRDV2, comprising a VL having an amino acid sequence having at least 95% identity to an amino acid sequence of SEQ ID NO:2888. In one aspect, provided herein is an antibody that binds TRDV2, comprising a VH having an amino acid sequence having at least 95% identity to an amino acid sequence of SEQ ID NO:2887, and a VL having an amino acid sequence having at least 95% identity to an amino acid sequence of SEQ ID NO:2888. In one aspect, provided herein is an antibody that binds TRDV2, comprising a heavy chain having an amino acid sequence having at least 95% identity to an amino acid sequence of SEQ ID NO:2889. In one aspect, provided herein is an antibody that binds TRDV2, comprising a light chain having an amino acid sequence having at least 95% identity to an amino acid sequence of SEQ ID NO:2890. In one aspect, provided herein is an antibody that binds TRDV2, comprising a heavy chain having an amino acid sequence having at least 95% identity to an amino acid sequence of SEQ ID NO:2889, and a light chain having an amino acid sequence having at least 95% identity to an amino acid sequence of SEQ ID NO:2890.

[0193] In one aspect, provided herein is an antibody that binds TRDV2, comprising: (i) a VH comprising a VH CDR1, a VH CDR2, and a VH CDR3 having an amino acid sequence of SEQ ID NOs:2891, 2892, and 2893, respectively, and (ii) a VL comprising a VL CDR1, VL CDR2, and VL CDR3 having an amino acid sequence of SEQ ID NOs:2894, 2895, and 2896, respectively. In one aspect, provided herein is an antibody that binds TRDV2, comprising: (i) a VH comprising a VH CDR1, a VH CDR2, and a VH CDR3 having an amino acid sequence of SEQ ID NOs:2897, 2898, and 2899, respectively, and (ii) a VL comprising a VL CDR1, VL CDR2, and VL CDR3 having an amino acid sequence of SEQ ID NOs:2900, 2901, and 2902, respectively. In one aspect, provided herein is an antibody that binds TRDV2, comprising: (i) a VH comprising a VH CDR1, a VH CDR2, and a VH CDR3 having an amino acid sequence of SEQ ID NOs:2903, 2904, and 2905, respectively, and (ii) a VL comprising a VL CDR1, VL CDR2, and VL CDR3 having an amino acid sequence of SEQ ID NOs:2906, 2907, and 2908, respectively. In one aspect, provided herein is an antibody that binds TRDV2, comprising: (i) a VH comprising a VH CDR1, a VH CDR2, and a VH CDR3 having an amino acid sequence of SEQ ID NOs:2909, 2910, and 2911, respectively, and (ii) a VL comprising a VL CDR1, VL CDR2, and VL CDR3 having an amino acid sequence of SEQ ID NOs:2912, 2913, and 2914, respectively. In one aspect, provided herein is an antibody that binds TRDV2, comprising: (i) a VH comprising a VH CDR1, a VH CDR2, and a VH CDR3 having an amino acid sequence of SEQ ID NOs:2915, 2916, and 2917, respectively, and (ii) a VL comprising a VL CDR1, VL CDR2, and VL CDR3 having an amino acid sequence of SEQ ID NOs:2918, 2919, and 2920, respectively. In one aspect, provided herein is an antibody that binds TRDV2, comprising: (i) a VH comprising a VH CDR1, a VH CDR2, and a VH CDR3 having an amino acid sequence of a VH CDR1, a VH CDR2, and a VH CDR3, respectively, of a VH having an amino acid sequence of SEQ ID NO:2921; and (ii) a VL comprising a VL CDR1, a VL CDR2, and a VL CDR3 having an amino acid sequence of a VL CDR1, a VL CDR2, and a VL CDR3, respectively, of SEQ ID NO:2922. In one aspect, provided herein is an antibody that binds TRDV2, comprising a VH having an amino acid sequence of SEQ ID NO:2921. In one aspect, provided herein is an antibody that binds TRDV2, comprising a VL having an amino acid sequence of SEQ ID NO:2922. In one aspect, provided herein is an antibody that binds TRDV2, comprising a VH having an amino acid sequence of SEQ ID NO:2921, and a VL having an amino acid sequence of SEQ ID NO:2922. In one aspect, provided herein is an antibody that binds TRDV2, comprising a heavy chain having an amino acid sequence of SEQ ID NO:2923. In one aspect, provided herein is an antibody that binds TRDV2, comprising a light chain having an amino acid sequence of SEQ ID NO:2924. In one aspect, provided herein is an antibody that binds TRDV2, comprising a heavy chain having an amino acid sequence of SEQ ID NO:2923, and a light chain having an amino acid sequence of SEQ ID NO:2924. In one aspect, provided herein is an antibody that binds TRDV2, comprising a VH having an amino acid sequence having at least 95% identity to an amino acid sequence of SEQ ID NO:2921. In one aspect, provided herein is an antibody that binds TRDV2, comprising a VL having an amino acid sequence having at least 95% identity to an amino acid sequence of SEQ ID NO:2922. In one aspect, provided herein is an antibody that binds TRDV2, comprising a VH having an amino acid sequence having at least 95% identity to an amino acid sequence of SEQ ID NO:2921, and a VL having an amino acid sequence having at least 95% identity to an amino acid sequence of SEQ ID NO:2922. In one aspect, provided herein is an antibody that binds TRDV2, comprising a heavy chain having an amino acid sequence having at least 95% identity to an amino acid sequence of SEQ ID NO:2923. In one aspect, provided herein is an antibody that binds TRDV2, comprising a light chain having an amino acid sequence having at least 95% identity to an amino acid sequence of SEQ ID NO:2924. In one aspect, provided herein is an antibody that binds TRDV2, comprising a heavy chain having an amino acid sequence having at least 95% identity to an amino acid sequence of SEQ ID NO:2923, and a light chain having an amino acid sequence having at least 95% identity to an amino acid sequence of SEQ ID NO:2924.

[0194] In one aspect, provided herein is an antibody that binds TRDV2, comprising: (i) a VH comprising a VH CDR1, a VH CDR2, and a VH CDR3 having an amino acid sequence of SEQ ID NOs:2925, 2926, and 2927, respectively, and (ii) a VL comprising a VL CDR1, VL CDR2, and VL CDR3 having an amino acid sequence of SEQ ID NOs:2928, 2929, and 2930, respectively. In one aspect, provided herein is an antibody that binds TRDV2, comprising: (i) a VH comprising a VH CDR1, a VH CDR2, and a VH CDR3 having an amino acid sequence of SEQ ID NOs:2931, 2932, and 2933, respectively, and (ii) a VL comprising a VL CDR1, VL CDR2, and VL CDR3 having an amino acid sequence of SEQ ID NOs:2934, 2935, and 2936, respectively. In one aspect, provided herein is an antibody that binds TRDV2, comprising: (i) a VH comprising a VH CDR1, a VH CDR2, and a VH CDR3 having an amino acid sequence of SEQ ID NOs:2937, 2938, and 2939, respectively, and (ii) a VL comprising a VL CDR1, VL CDR2, and VL CDR3 having an amino acid sequence of SEQ ID NOs:2940, 2941, and 2942, respectively. In one aspect, provided herein is an antibody that binds TRDV2, comprising: (i) a VH comprising a VH CDR1, a VH CDR2, and a VH CDR3 having an amino acid sequence of SEQ ID NOs:2943, 2944, and 2945, respectively, and (ii) a VL comprising a VL CDR1, VL CDR2, and VL CDR3 having an amino acid sequence of SEQ ID NOs:2946, 2947, and 2948, respectively. In one aspect, provided herein is an antibody that binds TRDV2, comprising: (i) a VH comprising a VH CDR1, a VH CDR2, and a VH CDR3 having an amino acid sequence of SEQ ID NOs:2949, 2950, and 2951, respectively, and (ii) a VL comprising a VL CDR1, VL CDR2, and VL CDR3 having an amino acid sequence of SEQ ID NOs:2952, 2953, and 2954, respectively. In one aspect, provided herein is an antibody that binds TRDV2, comprising: (i) a VH comprising a VH CDR1, a VH CDR2, and a VH CDR3 having an amino acid sequence of a VH CDR1, a VH CDR2, and a VH CDR3, respectively, of a VH having an amino acid sequence of SEQ ID NO:2955; and (ii) a VL comprising a VL CDR1, a VL CDR2, and a VL CDR3 having an amino acid sequence of a VL CDR1, a VL CDR2, and a VL CDR3, respectively, of SEQ ID NO:2956. In one aspect, provided herein is an antibody that binds TRDV2, comprising a VH having an amino acid sequence of SEQ ID NO:2955. In one aspect, provided herein is an antibody that binds TRDV2, comprising a VL having an amino acid sequence of SEQ ID NO:2956. In one aspect, provided herein is an antibody that binds TRDV2, comprising a VH having an amino acid sequence of SEQ ID NO:2955, and a VL having an amino acid sequence of SEQ ID NO:2956. In one aspect, provided herein is an antibody that binds TRDV2, comprising a heavy chain having an amino acid sequence of SEQ ID NO:2957. In one aspect, provided herein is an antibody that binds TRDV2, comprising a light chain having an amino acid sequence of SEQ ID NO:2958. In one aspect, provided herein is an antibody that binds TRDV2, comprising a heavy chain having an amino acid sequence of SEQ ID NO:2957, and a light chain having an amino acid sequence of SEQ ID NO:2958. In one aspect, provided herein is an antibody that binds TRDV2, comprising a VH having an amino acid sequence having at least 95% identity to an amino acid sequence of SEQ ID NO:2955. In one aspect, provided herein is an antibody that binds TRDV2, comprising a VL having an amino acid sequence having at least 95% identity to an amino acid sequence of SEQ ID NO:2956. In one aspect, provided herein is an antibody that binds TRDV2, comprising a VH having an amino acid sequence having at least 95% identity to an amino acid sequence of SEQ ID NO:2955, and a VL having an amino acid sequence having at least 95% identity to an amino acid sequence of SEQ ID NO:2956. In one aspect, provided herein is an antibody that binds TRDV2, comprising a heavy chain having an amino acid sequence having at least 95% identity to an amino acid sequence of SEQ ID NO:2957. In one aspect, provided herein is an antibody that binds TRDV2, comprising a light chain having an amino acid sequence having at least 95% identity to an amino acid sequence of SEQ ID NO:2958. In one aspect, provided herein is an antibody that binds TRDV2, comprising a heavy chain having an amino acid sequence having at least 95% identity to an amino acid sequence of SEQ ID NO:2957, and a light chain having an amino acid sequence having at least 95% identity to an amino acid sequence of SEQ ID NO:2958.

[0195] In one aspect, provided herein is an antibody that binds TRDV2, comprising: (i) a VH comprising a VH CDR1, a VH CDR2, and a VH CDR3 having an amino acid sequence of SEQ ID NOs:2959, 2960, and 2961, respectively, and (ii) a VL comprising a VL CDR1, VL CDR2, and VL CDR3 having an amino acid sequence of SEQ ID NOs:2962, 2963, and 2964, respectively. In one aspect, provided herein is an antibody that binds TRDV2, comprising: (i) a VH comprising a VH CDR1, a VH CDR2, and a VH CDR3 having an amino acid sequence of SEQ ID NOs:2965, 2966, and 2967, respectively, and (ii) a VL comprising a VL CDR1, VL CDR2, and VL CDR3 having an amino acid sequence of SEQ ID NOs:2968, 2969, and 2970, respectively. In one aspect, provided herein is an antibody that binds TRDV2, comprising: (i) a VH comprising a VH CDR1, a VH CDR2, and a VH CDR3 having an amino acid sequence of SEQ ID NOs:2971, 2972, and 2973, respectively, and (ii) a VL comprising a VL CDR1, VL CDR2, and VL CDR3 having an amino acid sequence of SEQ ID NOs:2974, 2975, and 2976, respectively. In one aspect, provided herein is an antibody that binds TRDV2, comprising: (i) a VH comprising a VH CDR1, a VH CDR2, and a VH CDR3 having an amino acid sequence of SEQ ID NOs:2977, 2978, and 2979, respectively, and (ii) a VL comprising a VL CDR1, VL CDR2, and VL CDR3 having an amino acid sequence of SEQ ID NOs:2980, 2981, and 2982, respectively. In one aspect, provided herein is an antibody that binds TRDV2, comprising: (i) a VH comprising a VH CDR1, a VH CDR2, and a VH CDR3 having an amino acid sequence of SEQ ID NOs:2983, 2984, and 2985, respectively, and (ii) a VL comprising a VL CDR1, VL CDR2, and VL CDR3 having an amino acid sequence of SEQ ID NOs:2986, 2987, and 2988, respectively. In one aspect, provided herein is an antibody that binds TRDV2, comprising: (i) a VH comprising a VH CDR1, a VH CDR2, and a VH CDR3 having an amino acid sequence of a VH CDR1, a VH CDR2, and a VH CDR3, respectively, of a VH having an amino acid sequence of SEQ ID NO:2989; and (ii) a VL comprising a VL CDR1, a VL CDR2, and a VL CDR3 having an amino acid sequence of a VL CDR1, a VL CDR2, and a VL CDR3, respectively, of SEQ ID NO:2990. In one aspect, provided herein is an antibody that binds TRDV2, comprising a VH having an amino acid sequence of SEQ ID NO:2989. In one aspect, provided herein is an antibody that binds TRDV2, comprising a VL having an amino acid sequence of SEQ ID NO:2990. In one aspect, provided herein is an antibody that binds TRDV2, comprising a VH having an amino acid sequence of SEQ ID NO:2989, and a VL having an amino acid sequence of SEQ ID NO:2990. In one aspect, provided herein is an antibody that binds TRDV2, comprising a heavy chain having an amino acid sequence of SEQ ID NO:2991. In one aspect, provided herein is an antibody that binds TRDV2, comprising a light chain having an amino acid sequence of SEQ ID NO:2992. In one aspect, provided herein is an antibody that binds TRDV2, comprising a heavy chain having an amino acid sequence of SEQ ID NO:2991, and a light chain having an amino acid sequence of SEQ ID NO:2992. In one aspect, provided herein is an antibody that binds TRDV2, comprising a VH having an amino acid sequence having at least 95% identity to an amino acid sequence of SEQ ID NO:2989. In one aspect, provided herein is an antibody that binds TRDV2, comprising a VL having an amino acid sequence having at least 95% identity to an amino acid sequence of SEQ ID NO:2990. In one aspect, provided herein is an antibody that binds TRDV2, comprising a VH having an amino acid sequence having at least 95% identity to an amino acid sequence of SEQ ID NO:2989, and a VL having an amino acid sequence having at least 95% identity to an amino acid sequence of SEQ ID NO:2990. In one aspect, provided herein is an antibody that binds TRDV2, comprising a heavy chain having an amino acid sequence having at least 95% identity to an amino acid sequence of SEQ ID NO:2991. In one aspect, provided herein is an antibody that binds TRDV2, comprising a light chain having an amino acid sequence having at least 95% identity to an amino acid sequence of SEQ ID NO:2992. In one aspect, provided herein is an antibody that binds TRDV2, comprising a heavy chain having an amino acid sequence having at least 95% identity to an amino acid sequence of SEQ ID NO:2991, and a light chain having an amino acid sequence having at least 95% identity to an amino acid sequence of SEQ ID NO:2992.

[0196] In one aspect, provided herein is an antibody that binds TRDV2, comprising: (i) a VH comprising a VH CDR1, a VH CDR2, and a VH CDR3 having an amino acid sequence of SEQ ID NOs:2993, 2994, and 2995, respectively, and (ii) a VL comprising a VL CDR1, VL CDR2, and VL CDR3 having an amino acid sequence of SEQ ID NOs:2996, 2997, and 2998, respectively. In one aspect, provided herein is an antibody that binds TRDV2, comprising: (i) a VH comprising a VH CDR1, a VH CDR2, and a VH CDR3 having an amino acid sequence of SEQ ID NOs:2999, 3000, and 3001, respectively, and (ii) a VL comprising a VL CDR1, VL CDR2, and VL CDR3 having an amino acid sequence of SEQ ID NOs:3002, 3003, and 3004, respectively. In one aspect, provided herein is an antibody that binds TRDV2, comprising: (i) a VH comprising a VH CDR1, a VH CDR2, and a VH CDR3 having an amino acid sequence of SEQ ID NOs:3005, 3006, and 3007, respectively, and (ii) a VL comprising a VL CDR1, VL CDR2, and VL CDR3 having an amino acid sequence of SEQ ID NOs:3008, 3009, and 3010, respectively. In one aspect, provided herein is an antibody that binds TRDV2, comprising: (i) a VH comprising a VH CDR1, a VH CDR2, and a VH CDR3 having an amino acid sequence of SEQ ID NOs:3011, 3012, and 3013, respectively, and (ii) a VL comprising a VL CDR1, VL CDR2, and VL CDR3 having an amino acid sequence of SEQ ID NOs:3014, 3015, and 3016, respectively. In one aspect, provided herein is an antibody that binds TRDV2, comprising: (i) a VH comprising a VH CDR1, a VH CDR2, and a VH CDR3 having an amino acid sequence of SEQ ID NOs:3017, 3018, and 3019, respectively, and (ii) a VL comprising a VL CDR1, VL CDR2, and VL CDR3 having an amino acid sequence of SEQ ID NOs:3020, 3021, and 3022, respectively. In one aspect, provided herein is an antibody that binds TRDV2, comprising: (i) a VH comprising a VH CDR1, a VH CDR2, and a VH CDR3 having an amino acid sequence of a VH CDR1, a VH CDR2, and a VH CDR3, respectively, of a VH having an amino acid sequence of SEQ ID NO:3023; and (ii) a VL comprising a VL CDR1, a VL CDR2, and a VL CDR3 having an amino acid sequence of a VL CDR1, a VL CDR2, and a VL CDR3, respectively, of SEQ ID NO:3024. In one aspect, provided herein is an antibody that binds TRDV2, comprising a VH having an amino acid sequence of SEQ ID NO:3023. In one aspect, provided herein is an antibody that binds TRDV2, comprising a VL having an amino acid sequence of SEQ ID NO:3024. In one aspect, provided herein is an antibody that binds TRDV2, comprising a VH having an amino acid sequence of SEQ ID NO:3023, and a VL having an amino acid sequence of SEQ ID NO:3024. In one aspect, provided herein is an antibody that binds TRDV2, comprising a heavy chain having an amino acid sequence of SEQ ID NO:3025. In one aspect, provided herein is an antibody that binds TRDV2, comprising a light chain having an amino acid sequence of SEQ ID NO:3026. In one aspect, provided herein is an antibody that binds TRDV2, comprising a heavy chain having an amino acid sequence of SEQ ID NO:3025, and a light chain having an amino acid sequence of SEQ ID NO:3026. In one aspect, provided herein is an antibody that binds TRDV2, comprising a VH having an amino acid sequence having at least 95% identity to an amino acid sequence of SEQ ID NO:3023. In one aspect, provided herein is an antibody that binds TRDV2, comprising a VL having an amino acid sequence having at least 95% identity to an amino acid sequence of SEQ ID NO:3024. In one aspect, provided herein is an antibody that binds TRDV2, comprising a VH having an amino acid sequence having at least 95% identity to an amino acid sequence of SEQ ID NO:3023, and a VL having an amino acid sequence having at least 95% identity to an amino acid sequence of SEQ ID NO:3024. In one aspect, provided herein is an antibody that binds TRDV2, comprising a heavy chain having an amino acid sequence having at least 95% identity to an amino acid sequence of SEQ ID NO:3025. In one aspect, provided herein is an antibody that binds TRDV2, comprising a light chain having an amino acid sequence having at least 95% identity to an amino acid sequence of SEQ ID NO:3026. In one aspect, provided herein is an antibody that binds TRDV2, comprising a heavy chain having an amino acid sequence having at least 95% identity to an amino acid sequence of SEQ ID NO:3025, and a light chain having an amino acid sequence having at least 95% identity to an amino acid sequence of SEQ ID NO:3026.

[0197] In one aspect, provided herein is an antibody that binds TRDV2, comprising: (i) a VH comprising a VH CDR1, a VH CDR2, and a VH CDR3 having an amino acid sequence of SEQ ID NOs:3027, 3028, and 3029, respectively, and (ii) a VL comprising a VL CDR1, VL CDR2, and VL CDR3 having an amino acid sequence of SEQ ID NOs:3030, 3031, and 3032, respectively. In one aspect, provided herein is an antibody that binds TRDV2, comprising: (i) a VH comprising a VH CDR1, a VH CDR2, and a VH CDR3 having an amino acid sequence of SEQ ID NOs:3033, 3034, and 3035, respectively, and (ii) a VL comprising a VL CDR1, VL CDR2, and VL CDR3 having an amino acid sequence of SEQ ID NOs:3036, 3037, and 3038, respectively. In one aspect, provided herein is an antibody that binds TRDV2, comprising: (i) a VH comprising a VH CDR1, a VH CDR2, and a VH CDR3 having an amino acid sequence of SEQ ID NOs:3039, 3040, and 3041, respectively, and (ii) a VL comprising a VL CDR1, VL CDR2, and VL CDR3 having an amino acid sequence of SEQ ID NOs:3042, 3043, and 3044, respectively. In one aspect, provided herein is an antibody that binds TRDV2, comprising: (i) a VH comprising a VH CDR1, a VH CDR2, and a VH CDR3 having an amino acid sequence of SEQ ID NOs:3045, 3046, and 3047, respectively, and (ii) a VL comprising a VL CDR1, VL CDR2, and VL CDR3 having an amino acid sequence of SEQ ID NOs:3048, 3049, and 3050, respectively. In one aspect, provided herein is an antibody that binds TRDV2, comprising: (i) a VH comprising a VH CDR1, a VH CDR2, and a VH CDR3 having an amino acid sequence of SEQ ID NOs:3051, 3052, and 3053, respectively, and (ii) a VL comprising a VL CDR1, VL CDR2, and VL CDR3 having an amino acid sequence of SEQ ID NOs:3054, 3055, and 3056, respectively. In one aspect, provided herein is an antibody that binds TRDV2, comprising: (i) a VH comprising a VH CDR1, a VH CDR2, and a VH CDR3 having an amino acid sequence of a VH CDR1, a VH CDR2, and a VH CDR3, respectively, of a VH having an amino acid sequence of SEQ ID NO:3057; and (ii) a VL comprising a VL CDR1, a VL CDR2, and a VL CDR3 having an amino acid sequence of a VL CDR1, a VL CDR2, and a VL CDR3, respectively, of SEQ ID NO:3058. In one aspect, provided herein is an antibody that binds TRDV2, comprising a VH having an amino acid sequence of SEQ ID NO:3057. In one aspect, provided herein is an antibody that binds TRDV2, comprising a VL having an amino acid sequence of SEQ ID NO:3058. In one aspect, provided herein is an antibody that binds TRDV2, comprising a VH having an amino acid sequence of SEQ ID NO:3057, and a VL having an amino acid sequence of SEQ ID NO:3058. In one aspect, provided herein is an antibody that binds TRDV2, comprising a heavy chain having an amino acid sequence of SEQ ID NO:3059. In one aspect, provided herein is an antibody that binds TRDV2, comprising a light chain having an amino acid sequence of SEQ ID NO:3060. In one aspect, provided herein is an antibody that binds TRDV2, comprising a heavy chain having an amino acid sequence of SEQ ID NO:3059, and a light chain having an amino acid sequence of SEQ ID NO:3060. In one aspect, provided herein is an antibody that binds TRDV2, comprising a VH having an amino acid sequence having at least 95% identity to an amino acid sequence of SEQ ID NO:3057. In one aspect, provided herein is an antibody that binds TRDV2, comprising a VL having an amino acid sequence having at least 95% identity to an amino acid sequence of SEQ ID NO:3058. In one aspect, provided herein is an antibody that binds TRDV2, comprising a VH having an amino acid sequence having at least 95% identity to an amino acid sequence of SEQ ID NO:3057, and a VL having an amino acid sequence having at least 95% identity to an amino acid sequence of SEQ ID NO:3058. In one aspect, provided herein is an antibody that binds TRDV2, comprising a heavy chain having an amino acid sequence having at least 95% identity to an amino acid sequence of SEQ ID NO:3059. In one aspect, provided herein is an antibody that binds TRDV2, comprising a light chain having an amino acid sequence having at least 95% identity to an amino acid sequence of SEQ ID NO:3060. In one aspect, provided herein is an antibody that binds TRDV2, comprising a heavy chain having an amino acid sequence having at least 95% identity to an amino acid sequence of SEQ ID NO:3059, and a light chain having an amino acid sequence having at least 95% identity to an amino acid sequence of SEQ ID NO:3060.

[0198] In one aspect, provided herein is an antibody that binds TRDV2, comprising: (i) a VH comprising a VH CDR1, a VH CDR2, and a VH CDR3 having an amino acid sequence of SEQ ID NOs:3061, 3062, and 3063, respectively, and (ii) a VL comprising a VL CDR1, VL CDR2, and VL CDR3 having an amino acid sequence of SEQ ID NOs:3064, 3065, and 3066, respectively. In one aspect, provided herein is an antibody that binds TRDV2, comprising: (i) a VH comprising a VH CDR1, a VH CDR2, and a VH CDR3 having an amino acid sequence of SEQ ID NOs:3067, 3068, and 3069, respectively, and (ii) a VL comprising a VL CDR1, VL CDR2, and VL CDR3 having an amino acid sequence of SEQ ID NOs:3070, 3071, and 3072, respectively. In one aspect, provided herein is an antibody that binds TRDV2, comprising: (i) a VH comprising a VH CDR1, a VH CDR2, and a VH CDR3 having an amino acid sequence of SEQ ID NOs:3073, 3074, and 3075, respectively, and (ii) a VL comprising a VL CDR1, VL CDR2, and VL CDR3 having an amino acid sequence of SEQ ID NOs:3076, 3077, and 3078, respectively. In one aspect, provided herein is an antibody that binds TRDV2, comprising: (i) a VH comprising a VH CDR1, a VH CDR2, and a VH CDR3 having an amino acid sequence of SEQ ID NOs:3079, 3080, and 3081, respectively, and (ii) a VL comprising a VL CDR1, VL CDR2, and VL CDR3 having an amino acid sequence of SEQ ID NOs:3082, 3083, and 3084, respectively. In one aspect, provided herein is an antibody that binds TRDV2, comprising: (i) a VH comprising a VH CDR1, a VH CDR2, and a VH CDR3 having an amino acid sequence of SEQ ID NOs:3085, 3086, and 3087, respectively, and (ii) a VL comprising a VL CDR1, VL CDR2, and VL CDR3 having an amino acid sequence of SEQ ID NOs:3088, 3089, and 3090, respectively. In one aspect, provided herein is an antibody that binds TRDV2, comprising: (i) a VH comprising a VH CDR1, a VH CDR2, and a VH CDR3 having an amino acid sequence of a VH CDR1, a VH CDR2, and a VH CDR3, respectively, of a VH having an amino acid sequence of SEQ ID NO:3091; and (ii) a VL comprising a VL CDR1, a VL CDR2, and a VL CDR3 having an amino acid sequence of a VL CDR1, a VL CDR2, and a VL CDR3, respectively, of SEQ ID NO:3092. In one aspect, provided herein is an antibody that binds TRDV2, comprising a VH having an amino acid sequence of SEQ ID NO:3091. In one aspect, provided herein is an antibody that binds TRDV2, comprising a VL having an amino acid sequence of SEQ ID NO:3092. In one aspect, provided herein is an antibody that binds TRDV2, comprising a VH having an amino acid sequence of SEQ ID NO:3091, and a VL having an amino acid sequence of SEQ ID NO:3092. In one aspect, provided herein is an antibody that binds TRDV2, comprising a heavy chain having an amino acid sequence of SEQ ID NO:3093. In one aspect, provided herein is an antibody that binds TRDV2, comprising a light chain having an amino acid sequence of SEQ ID NO:3094. In one aspect, provided herein is an antibody that binds TRDV2, comprising a heavy chain having an amino acid sequence of SEQ ID NO:3093, and a light chain having an amino acid sequence of SEQ ID NO:3094. In one aspect, provided herein is an antibody that binds TRDV2, comprising a VH having an amino acid sequence having at least 95% identity to an amino acid sequence of SEQ ID NO:3091. In one aspect, provided herein is an antibody that binds TRDV2, comprising a VL having an amino acid sequence having at least 95% identity to an amino acid sequence of SEQ ID NO:3092. In one aspect, provided herein is an antibody that binds TRDV2, comprising a VH having an amino acid sequence having at least 95% identity to an amino acid sequence of SEQ ID NO:3091, and a VL having an amino acid sequence having at least 95% identity to an amino acid sequence of SEQ ID NO:3092. In one aspect, provided herein is an antibody that binds TRDV2, comprising a heavy chain having an amino acid sequence having at least 95% identity to an amino acid sequence of SEQ ID NO:3093. In one aspect, provided herein is an antibody that binds TRDV2, comprising a light chain having an amino acid sequence having at least 95% identity to an amino acid sequence of SEQ ID NO:3094. In one aspect, provided herein is an antibody that binds TRDV2, comprising a heavy chain having an amino acid sequence having at least 95% identity to an amino acid sequence of SEQ ID NO:3093, and a light chain having an amino acid sequence having at least 95% identity to an amino acid sequence of SEQ ID NO:3094.

[0199] In one aspect, provided herein is an antibody that binds TRDV2, comprising: (i) a VH comprising a VH CDR1, a VH CDR2, and a VH CDR3 having an amino acid sequence of SEQ ID NOs:3095, 3096, and 3097, respectively, and (ii) a VL comprising a VL CDR1, VL CDR2, and VL CDR3 having an amino acid sequence of SEQ ID NOs:3098, 3099, and 3100, respectively. In one aspect, provided herein is an antibody that binds TRDV2, comprising: (i) a VH comprising a VH CDR1, a VH CDR2, and a VH CDR3 having an amino acid sequence of SEQ ID NOs:3101, 3102, and 3103, respectively, and (ii) a VL comprising a VL CDR1, VL CDR2, and VL CDR3 having an amino acid sequence of SEQ ID NOs:3104, 3105, and 3106, respectively. In one aspect, provided herein is an antibody that binds TRDV2, comprising: (i) a VH comprising a VH CDR1, a VH CDR2, and a VH CDR3 having an amino acid sequence of SEQ ID NOs:3107, 3108, and 3109, respectively, and (ii) a VL comprising a VL CDR1, VL CDR2, and VL CDR3 having an amino acid sequence of SEQ ID NOs:3110, 3111, and 3112, respectively. In one aspect, provided herein is an antibody that binds TRDV2, comprising: (i) a VH comprising a VH CDR1, a VH CDR2, and a VH CDR3 having an amino acid sequence of SEQ ID NOs:3113, 3114, and 3115, respectively, and (ii) a VL comprising a VL CDR1, VL CDR2, and VL CDR3 having an amino acid sequence of SEQ ID NOs:3116, 3117, and 3118, respectively. In one aspect, provided herein is an antibody that binds TRDV2, comprising: (i) a VH comprising a VH CDR1, a VH CDR2, and a VH CDR3 having an amino acid sequence of SEQ ID NOs:3119, 3120, and 3121, respectively, and (ii) a VL comprising a VL CDR1, VL CDR2, and VL CDR3 having an amino acid sequence of SEQ ID NOs:3122, 3123, and 3124, respectively. In one aspect, provided herein is an antibody that binds TRDV2, comprising: (i) a VH comprising a VH CDR1, a VH CDR2, and a VH CDR3 having an amino acid sequence of a VH CDR1, a VH CDR2, and a VH CDR3, respectively, of a VH having an amino acid sequence of SEQ ID NO:3125; and (ii) a VL comprising a VL CDR1, a VL CDR2, and a VL CDR3 having an amino acid sequence of a VL CDR1, a VL CDR2, and a VL CDR3, respectively, of SEQ ID NO:3126. In one aspect, provided herein is an antibody that binds TRDV2, comprising a VH having an amino acid sequence of SEQ ID NO:3125. In one aspect, provided herein is an antibody that binds TRDV2, comprising a VL having an amino acid sequence of SEQ ID NO:3126. In one aspect, provided herein is an antibody that binds TRDV2, comprising a VH having an amino acid sequence of SEQ ID NO:3125, and a VL having an amino acid sequence of SEQ ID NO:3126. In one aspect, provided herein is an antibody that binds TRDV2, comprising a heavy chain having an amino acid sequence of SEQ ID NO:3127. In one aspect, provided herein is an antibody that binds TRDV2, comprising a light chain having an amino acid sequence of SEQ ID NO:3128. In one aspect, provided herein is an antibody that binds TRDV2, comprising a heavy chain having an amino acid sequence of SEQ ID NO:3127, and a light chain having an amino acid sequence of SEQ ID NO:3128. In one aspect, provided herein is an antibody that binds TRDV2, comprising a VH having an amino acid sequence having at least 95% identity to an amino acid sequence of SEQ ID NO:3125. In one aspect, provided herein is an antibody that binds TRDV2, comprising a VL having an amino acid sequence having at least 95% identity to an amino acid sequence of SEQ ID NO:3126. In one aspect, provided herein is an antibody that binds TRDV2, comprising a VH having an amino acid sequence having at least 95% identity to an amino acid sequence of SEQ ID NO:3125, and a VL having an amino acid sequence having at least 95% identity to an amino acid sequence of SEQ ID NO:3126. In one aspect, provided herein is an antibody that binds TRDV2, comprising a heavy chain having an amino acid sequence having at least 95% identity to an amino acid sequence of SEQ ID NO:3127. In one aspect, provided herein is an antibody that binds TRDV2, comprising a light chain having an amino acid sequence having at least 95% identity to an amino acid sequence of SEQ ID NO:3128. In one aspect, provided herein is an antibody that binds TRDV2, comprising a heavy chain having an amino acid sequence having at least 95% identity to an amino acid sequence of SEQ ID NO:3127, and a light chain having an amino acid sequence having at least 95% identity to an amino acid sequence of SEQ ID NO:3128.

[0200] In one aspect, provided herein is an antibody that binds TRDV2, comprising: (i) a VH comprising a VH CDR1, a VH CDR2, and a VH CDR3 having an amino acid sequence of SEQ ID NOs:3129, 3130, and 3131, respectively, and (ii) a VL comprising a VL CDR1, VL CDR2, and VL CDR3 having an amino acid sequence of SEQ ID NOs:3132, 3133, and 3134, respectively. In one aspect, provided herein is an antibody that binds TRDV2, comprising: (i) a VH comprising a VH CDR1, a VH CDR2, and a VH CDR3 having an amino acid sequence of SEQ ID NOs:3135, 3136, and 3137, respectively, and (ii) a VL comprising a VL CDR1, VL CDR2, and VL CDR3 having an amino acid sequence of SEQ ID NOs:3138, 3139, and 3140, respectively. In one aspect, provided herein is an antibody that binds TRDV2, comprising: (i) a VH comprising a VH CDR1, a VH CDR2, and a VH CDR3 having an amino acid sequence of SEQ ID NOs:3141, 3142, and 3143, respectively, and (ii) a VL comprising a VL CDR1, VL CDR2, and VL CDR3 having an amino acid sequence of SEQ ID NOs:3144, 3145, and 3146, respectively. In one aspect, provided herein is an antibody that binds TRDV2, comprising: (i) a VH comprising a VH CDR1, a VH CDR2, and a VH CDR3 having an amino acid sequence of SEQ ID NOs:3147, 3148, and 3149, respectively, and (ii) a VL comprising a VL CDR1, VL CDR2, and VL CDR3 having an amino acid sequence of SEQ ID NOs:3150, 3151, and 3152, respectively. In one aspect, provided herein is an antibody that binds TRDV2, comprising: (i) a VH comprising a VH CDR1, a VH CDR2, and a VH CDR3 having an amino acid sequence of SEQ ID NOs:3153, 3154, and 3155, respectively, and (ii) a VL comprising a VL CDR1, VL CDR2, and VL CDR3 having an amino acid sequence of SEQ ID NOs:3156, 3157, and 3158, respectively. In one aspect, provided herein is an antibody that binds TRDV2, comprising: (i) a VH comprising a VH CDR1, a VH CDR2, and a VH CDR3 having an amino acid sequence of a VH CDR1, a VH CDR2, and a VH CDR3, respectively, of a VH having an amino acid sequence of SEQ ID NO:3159; and (ii) a VL comprising a VL CDR1, a VL CDR2, and a VL CDR3 having an amino acid sequence of a VL CDR1, a VL CDR2, and a VL CDR3, respectively, of SEQ ID NO:3160. In one aspect, provided herein is an antibody that binds TRDV2, comprising a VH having an amino acid sequence of SEQ ID NO:3159. In one aspect, provided herein is an antibody that binds TRDV2, comprising a VL having an amino acid sequence of SEQ ID NO:3160. In one aspect, provided herein is an antibody that binds TRDV2, comprising a VH having an amino acid sequence of SEQ ID NO:3159, and a VL having an amino acid sequence of SEQ ID NO:3160. In one aspect, provided herein is an antibody that binds TRDV2, comprising a heavy chain having an amino acid sequence of SEQ ID NO:3161. In one aspect, provided herein is an antibody that binds TRDV2, comprising a light chain having an amino acid sequence of SEQ ID NO:3162. In one aspect, provided herein is an antibody that binds TRDV2, comprising a heavy chain having an amino acid sequence of SEQ ID NO:3161, and a light chain having an amino acid sequence of SEQ ID NO:3162. In one aspect, provided herein is an antibody that binds TRDV2, comprising a VH having an amino acid sequence having at least 95% identity to an amino acid sequence of SEQ ID NO:3159. In one aspect, provided herein is an antibody that binds TRDV2, comprising a VL having an amino acid sequence having at least 95% identity to an amino acid sequence of SEQ ID NO:3160. In one aspect, provided herein is an antibody that binds TRDV2, comprising a VH having an amino acid sequence having at least 95% identity to an amino acid sequence of SEQ ID NO:3159, and a VL having an amino acid sequence having at least 95% identity to an amino acid sequence of SEQ ID NO:3160. In one aspect, provided herein is an antibody that binds TRDV2, comprising a heavy chain having an amino acid sequence having at least 95% identity to an amino acid sequence of SEQ ID NO:3161. In one aspect, provided herein is an antibody that binds TRDV2, comprising a light chain having an amino acid sequence having at least 95% identity to an amino acid sequence of SEQ ID NO:3162. In one aspect, provided herein is an antibody that binds TRDV2, comprising a heavy chain having an amino acid sequence having at least 95% identity to an amino acid sequence of SEQ ID NO:3161, and a light chain having an amino acid sequence having at least 95% identity to an amino acid sequence of SEQ ID NO:3162.

[0201] In one aspect, provided herein is an antibody that binds TRDV2, comprising: (i) a VH comprising a VH CDR1, a VH CDR2, and a VH CDR3 having an amino acid sequence of SEQ ID NOs:3163, 3164, and 3165, respectively, and (ii) a VL comprising a VL CDR1, VL CDR2, and VL CDR3 having an amino acid sequence of SEQ ID NOs:3166, 3167, and 3168, respectively. In one aspect, provided herein is an antibody that binds TRDV2, comprising: (i) a VH comprising a VH CDR1, a VH CDR2, and a VH CDR3 having an amino acid sequence of SEQ ID NOs:3169, 3170, and 3171, respectively, and (ii) a VL comprising a VL CDR1, VL CDR2, and VL CDR3 having an amino acid sequence of SEQ ID NOs:3172, 3173, and 3174, respectively. In one aspect, provided herein is an antibody that binds TRDV2, comprising: (i) a VH comprising a VH CDR1, a VH CDR2, and a VH CDR3 having an amino acid sequence of SEQ ID NOs:3175, 3176, and 3177, respectively, and (ii) a VL comprising a VL CDR1, VL CDR2, and VL CDR3 having an amino acid sequence of SEQ ID NOs:3178, 3179, and 3180, respectively. In one aspect, provided herein is an antibody that binds TRDV2, comprising: (i) a VH comprising a VH CDR1, a VH CDR2, and a VH CDR3 having an amino acid sequence of SEQ ID NOs:3181, 3182, and 3183, respectively, and (ii) a VL comprising a VL CDR1, VL CDR2, and VL CDR3 having an amino acid sequence of SEQ ID NOs:3184, 3185, and 3186, respectively. In one aspect, provided herein is an antibody that binds TRDV2, comprising: (i) a VH comprising a VH CDR1, a VH CDR2, and a VH CDR3 having an amino acid sequence of SEQ ID NOs:3187, 3188, and 3189, respectively, and (ii) a VL comprising a VL CDR1, VL CDR2, and VL CDR3 having an amino acid sequence of SEQ ID NOs:3190, 3191, and 3192, respectively. In one aspect, provided herein is an antibody that binds TRDV2, comprising: (i) a VH comprising a VH CDR1, a VH CDR2, and a VH CDR3 having an amino acid sequence of a VH CDR1, a VH CDR2, and a VH CDR3, respectively, of a VH having an amino acid sequence of SEQ ID NO:3193; and (ii) a VL comprising a VL CDR1, a VL CDR2, and a VL CDR3 having an amino acid sequence of a VL CDR1, a VL CDR2, and a VL CDR3, respectively, of SEQ ID NO:3194. In one aspect, provided herein is an antibody that binds TRDV2, comprising a VH having an amino acid sequence of SEQ ID NO:3193. In one aspect, provided herein is an antibody that binds TRDV2, comprising a VL having an amino acid sequence of SEQ ID NO:3194. In one aspect, provided herein is an antibody that binds TRDV2, comprising a VH having an amino acid sequence of SEQ ID NO:3193, and a VL having an amino acid sequence of SEQ ID NO:3194. In one aspect, provided herein is an antibody that binds TRDV2, comprising a heavy chain having an amino acid sequence of SEQ ID NO:3195. In one aspect, provided herein is an antibody that binds TRDV2, comprising a light chain having an amino acid sequence of SEQ ID NO:3196. In one aspect, provided herein is an antibody that binds TRDV2, comprising a heavy chain having an amino acid sequence of SEQ ID NO:3195, and a light chain having an amino acid sequence of SEQ ID NO:3196. In one aspect, provided herein is an antibody that binds TRDV2, comprising a VH having an amino acid sequence having at least 95% identity to an amino acid sequence of SEQ ID NO:3193. In one aspect, provided herein is an antibody that binds TRDV2, comprising a VL having an amino acid sequence having at least 95% identity to an amino acid sequence of SEQ ID NO:3194. In one aspect, provided herein is an antibody that binds TRDV2, comprising a VH having an amino acid sequence having at least 95% identity to an amino acid sequence of SEQ ID NO:3193, and a VL having an amino acid sequence having at least 95% identity to an amino acid sequence of SEQ ID NO:3194. In one aspect, provided herein is an antibody that binds TRDV2, comprising a heavy chain having an amino acid sequence having at least 95% identity to an amino acid sequence of SEQ ID NO:3195. In one aspect, provided herein is an antibody that binds TRDV2, comprising a light chain having an amino acid sequence having at least 95% identity to an amino acid sequence of SEQ ID NO:3196. In one aspect, provided herein is an antibody that binds TRDV2, comprising a heavy chain having an amino acid sequence having at least 95% identity to an amino acid sequence of SEQ ID NO:3195, and a light chain having an amino acid sequence having at least 95% identity to an amino acid sequence of SEQ ID NO:3196.

[0202] In one aspect, provided herein is an antibody that binds TRDV2, comprising: (i) a VH comprising a VH CDR1, a VH CDR2, and a VH CDR3 having an amino acid sequence of SEQ ID NOs:3197, 3198, and 3199, respectively, and (ii) a VL comprising a VL CDR1, VL CDR2, and VL CDR3 having an amino acid sequence of SEQ ID NOs:3200, 3201, and 3202, respectively. In one aspect, provided herein is an antibody that binds TRDV2, comprising: (i) a VH comprising a VH CDR1, a VH CDR2, and a VH CDR3 having an amino acid sequence of SEQ ID NOs:3203, 3204, and 3205, respectively, and (ii) a VL comprising a VL CDR1, VL CDR2, and VL CDR3 having an amino acid sequence of SEQ ID NOs:3206, 3207, and 3208, respectively. In one aspect, provided herein is an antibody that binds TRDV2, comprising: (i) a VH comprising a VH CDR1, a VH CDR2, and a VH CDR3 having an amino acid sequence of SEQ ID NOs:3209, 3210, and 3211, respectively, and (ii) a VL comprising a VL CDR1, VL CDR2, and VL CDR3 having an amino acid sequence of SEQ ID NOs:3212, 3213, and 3214, respectively. In one aspect, provided herein is an antibody that binds TRDV2, comprising: (i) a VH comprising a VH CDR1, a VH CDR2, and a VH CDR3 having an amino acid sequence of SEQ ID NOs:3215, 3216, and 3217, respectively, and (ii) a VL comprising a VL CDR1, VL CDR2, and VL CDR3 having an amino acid sequence of SEQ ID NOs:3218, 3219, and 3220, respectively. In one aspect, provided herein is an antibody that binds TRDV2, comprising: (i) a VH comprising a VH CDR1, a VH CDR2, and a VH CDR3 having an amino acid sequence of SEQ ID NOs:3221, 3222, and 3223, respectively, and (ii) a VL comprising a VL CDR1, VL CDR2, and VL CDR3 having an amino acid sequence of SEQ ID NOs:3224, 3225, and 3226, respectively. In one aspect, provided herein is an antibody that binds TRDV2, comprising: (i) a VH comprising a VH CDR1, a VH CDR2, and a VH CDR3 having an amino acid sequence of a VH CDR1, a VH CDR2, and a VH CDR3, respectively, of a VH having an amino acid sequence of SEQ ID NO:3227; and (ii) a VL comprising a VL CDR1, a VL CDR2, and a VL CDR3 having an amino acid sequence of a VL CDR1, a VL CDR2, and a VL CDR3, respectively, of SEQ ID NO:3228. In one aspect, provided herein is an antibody that binds TRDV2, comprising a VH having an amino acid sequence of SEQ ID NO:3227. In one aspect, provided herein is an antibody that binds TRDV2, comprising a VL having an amino acid sequence of SEQ ID NO:3228. In one aspect, provided herein is an antibody that binds TRDV2, comprising a VH having an amino acid sequence of SEQ ID NO:3227, and a VL having an amino acid sequence of SEQ ID NO:3228. In one aspect, provided herein is an antibody that binds TRDV2, comprising a heavy chain having an amino acid sequence of SEQ ID NO:3229. In one aspect, provided herein is an antibody that binds TRDV2, comprising a light chain having an amino acid sequence of SEQ ID NO:3230. In one aspect, provided herein is an antibody that binds TRDV2, comprising a heavy chain having an amino acid sequence of SEQ ID NO:3229, and a light chain having an amino acid sequence of SEQ ID NO:3230. In one aspect, provided herein is an antibody that binds TRDV2, comprising a VH having an amino acid sequence having at least 95% identity to an amino acid sequence of SEQ ID NO:3227. In one aspect, provided herein is an antibody that binds TRDV2, comprising a VL having an amino acid sequence having at least 95% identity to an amino acid sequence of SEQ ID NO:3228. In one aspect, provided herein is an antibody that binds TRDV2, comprising a VH having an amino acid sequence having at least 95% identity to an amino acid sequence of SEQ ID NO:3227, and a VL having an amino acid sequence having at least 95% identity to an amino acid sequence of SEQ ID NO:3228. In one aspect, provided herein is an antibody that binds TRDV2, comprising a heavy chain having an amino acid sequence having at least 95% identity to an amino acid sequence of SEQ ID NO:3229. In one aspect, provided herein is an antibody that binds TRDV2, comprising a light chain having an amino acid sequence having at least 95% identity to an amino acid sequence of SEQ ID NO:3230. In one aspect, provided herein is an antibody that binds TRDV2, comprising a heavy chain having an amino acid sequence having at least 95% identity to an amino acid sequence of SEQ ID NO:3229, and a light chain having an amino acid sequence having at least 95% identity to an amino acid sequence of SEQ ID NO:3230.

[0203] In one aspect, provided herein is an antibody that binds TRDV2, comprising: (i) a VH comprising a VH CDR1, a VH CDR2, and a VH CDR3 having an amino acid sequence of SEQ ID NOs:3231, 3232, and 3233, respectively, and (ii) a VL comprising a VL CDR1, VL CDR2, and VL CDR3 having an amino acid sequence of SEQ ID NOs:3234, 3235, and 3236, respectively. In one aspect, provided herein is an antibody that binds TRDV2, comprising: (i) a VH comprising a VH CDR1, a VH CDR2, and a VH CDR3 having an amino acid sequence of SEQ ID NOs:3237, 3238, and 3239, respectively, and (ii) a VL comprising a VL CDR1, VL CDR2, and VL CDR3 having an amino acid sequence of SEQ ID NOs:3240, 3241, and 3242, respectively. In one aspect, provided herein is an antibody that binds TRDV2, comprising: (i) a VH comprising a VH CDR1, a VH CDR2, and a VH CDR3 having an amino acid sequence of SEQ ID NOs:3243, 3244, and 3245, respectively, and (ii) a VL comprising a VL CDR1, VL CDR2, and VL CDR3 having an amino acid sequence of SEQ ID NOs:3246, 3247, and 3248, respectively. In one aspect, provided herein is an antibody that binds TRDV2, comprising: (i) a VH comprising a VH CDR1, a VH CDR2, and a VH CDR3 having an amino acid sequence of SEQ ID NOs:3249, 3250, and 3251, respectively, and (ii) a VL comprising a VL CDR1, VL CDR2, and VL CDR3 having an amino acid sequence of SEQ ID NOs:3252, 3253, and 3254, respectively. In one aspect, provided herein is an antibody that binds TRDV2, comprising: (i) a VH comprising a VH CDR1, a VH CDR2, and a VH CDR3 having an amino acid sequence of SEQ ID NOs:3255, 3256, and 3257, respectively, and (ii) a VL comprising a VL CDR1, VL CDR2, and VL CDR3 having an amino acid sequence of SEQ ID NOs:3258, 3259, and 3260, respectively. In one aspect, provided herein is an antibody that binds TRDV2, comprising: (i) a VH comprising a VH CDR1, a VH CDR2, and a VH CDR3 having an amino acid sequence of a VH CDR1, a VH CDR2, and a VH CDR3, respectively, of a VH having an amino acid sequence of SEQ ID NO:3261; and (ii) a VL comprising a VL CDR1, a VL CDR2, and a VL CDR3 having an amino acid sequence of a VL CDR1, a VL CDR2, and a VL CDR3, respectively, of SEQ ID NO:3262. In one aspect, provided herein is an antibody that binds TRDV2, comprising a VH having an amino acid sequence of SEQ ID NO:3261. In one aspect, provided herein is an antibody that binds TRDV2, comprising a VL having an amino acid sequence of SEQ ID NO:3262. In one aspect, provided herein is an antibody that binds TRDV2, comprising a VH having an amino acid sequence of SEQ ID NO:3261, and a VL having an amino acid sequence of SEQ ID NO:3262. In one aspect, provided herein is an antibody that binds TRDV2, comprising a heavy chain having an amino acid sequence of SEQ ID NO:3263. In one aspect, provided herein is an antibody that binds TRDV2, comprising a light chain having an amino acid sequence of SEQ ID NO:3264. In one aspect, provided herein is an antibody that binds TRDV2, comprising a heavy chain having an amino acid sequence of SEQ ID NO:3263, and a light chain having an amino acid sequence of SEQ ID NO:3264. In one aspect, provided herein is an antibody that binds TRDV2, comprising a VH having an amino acid sequence having at least 95% identity to an amino acid sequence of SEQ ID NO:3261. In one aspect, provided herein is an antibody that binds TRDV2, comprising a VL having an amino acid sequence having at least 95% identity to an amino acid sequence of SEQ ID NO:3262. In one aspect, provided herein is an antibody that binds TRDV2, comprising a VH having an amino acid sequence having at least 95% identity to an amino acid sequence of SEQ ID NO:3261, and a VL having an amino acid sequence having at least 95% identity to an amino acid sequence of SEQ ID NO:3262. In one aspect, provided herein is an antibody that binds TRDV2, comprising a heavy chain having an amino acid sequence having at least 95% identity to an amino acid sequence of SEQ ID NO:3263. In one aspect, provided herein is an antibody that binds TRDV2, comprising a light chain having an amino acid sequence having at least 95% identity to an amino acid sequence of SEQ ID NO:3264. In one aspect, provided herein is an antibody that binds TRDV2, comprising a heavy chain having an amino acid sequence having at least 95% identity to an amino acid sequence of SEQ ID NO:3263, and a light chain having an amino acid sequence having at least 95% identity to an amino acid sequence of SEQ ID NO:3264.

[0204] In one aspect, provided herein is an antibody that binds TRDV2, comprising: (i) a VH comprising a VH CDR1, a VH CDR2, and a VH CDR3 having an amino acid sequence of SEQ ID NOs:3265, 3266, and 3267, respectively, and (ii) a VL comprising a VL CDR1, VL CDR2, and VL CDR3 having an amino acid sequence of SEQ ID NOs:3268, 3269, and 3270, respectively. In one aspect, provided herein is an antibody that binds TRDV2, comprising: (i) a VH comprising a VH CDR1, a VH CDR2, and a VH CDR3 having an amino acid sequence of SEQ ID NOs:3271, 3272, and 3273, respectively, and (ii) a VL comprising a VL CDR1, VL CDR2, and VL CDR3 having an amino acid sequence of SEQ ID NOs:3274, 3275, and 3276, respectively. In one aspect, provided herein is an antibody that binds TRDV2, comprising: (i) a VH comprising a VH CDR1, a VH CDR2, and a VH CDR3 having an amino acid sequence of SEQ ID NOs:3277, 3278, and 3279, respectively, and (ii) a VL comprising a VL CDR1, VL CDR2, and VL CDR3 having an amino acid sequence of SEQ ID NOs:3280, 3281, and 3282, respectively. In one aspect, provided herein is an antibody that binds TRDV2, comprising: (i) a VH comprising a VH CDR1, a VH CDR2, and a VH CDR3 having an amino acid sequence of SEQ ID NOs:3283, 3284, and 3285, respectively, and (ii) a VL comprising a VL CDR1, VL CDR2, and VL CDR3 having an amino acid sequence of SEQ ID NOs:3286, 3287, and 3288, respectively. In one aspect, provided herein is an antibody that binds TRDV2, comprising: (i) a VH comprising a VH CDR1, a VH CDR2, and a VH CDR3 having an amino acid sequence of SEQ ID NOs:3289, 3290, and 3291, respectively, and (ii) a VL comprising a VL CDR1, VL CDR2, and VL CDR3 having an amino acid sequence of SEQ ID NOs:3292, 3293, and 3294, respectively. In one aspect, provided herein is an antibody that binds TRDV2, comprising: (i) a VH comprising a VH CDR1, a VH CDR2, and a VH CDR3 having an amino acid sequence of a VH CDR1, a VH CDR2, and a VH CDR3, respectively, of a VH having an amino acid sequence of SEQ ID NO:3295; and (ii) a VL comprising a VL CDR1, a VL CDR2, and a VL CDR3 having an amino acid sequence of a VL CDR1, a VL CDR2, and a VL CDR3, respectively, of SEQ ID NO:3296. In one aspect, provided herein is an antibody that binds TRDV2, comprising a VH having an amino acid sequence of SEQ ID NO:3295. In one aspect, provided herein is an antibody that binds TRDV2, comprising a VL having an amino acid sequence of SEQ ID NO:3296. In one aspect, provided herein is an antibody that binds TRDV2, comprising a VH having an amino acid sequence of SEQ ID NO:3295, and a VL having an amino acid sequence of SEQ ID NO:3296. In one aspect, provided herein is an antibody that binds TRDV2, comprising a heavy chain having an amino acid sequence of SEQ ID NO:3297. In one aspect, provided herein is an antibody that binds TRDV2, comprising a light chain having an amino acid sequence of SEQ ID NO:3298. In one aspect, provided herein is an antibody that binds TRDV2, comprising a heavy chain having an amino acid sequence of SEQ ID NO:3297, and a light chain having an amino acid sequence of SEQ ID NO:3298. In one aspect, provided herein is an antibody that binds TRDV2, comprising a VH having an amino acid sequence having at least 95% identity to an amino acid sequence of SEQ ID NO:3295. In one aspect, provided herein is an antibody that binds TRDV2, comprising a VL having an amino acid sequence having at least 95% identity to an amino acid sequence of SEQ ID NO:3296. In one aspect, provided herein is an antibody that binds TRDV2, comprising a VH having an amino acid sequence having at least 95% identity to an amino acid sequence of SEQ ID NO:3295, and a VL having an amino acid sequence having at least 95% identity to an amino acid sequence of SEQ ID NO:3296. In one aspect, provided herein is an antibody that binds TRDV2, comprising a heavy chain having an amino acid sequence having at least 95% identity to an amino acid sequence of SEQ ID NO:3297. In one aspect, provided herein is an antibody that binds TRDV2, comprising a light chain having an amino acid sequence having at least 95% identity to an amino acid sequence of SEQ ID NO:3298. In one aspect, provided herein is an antibody that binds TRDV2, comprising a heavy chain having an amino acid sequence having at least 95% identity to an amino acid sequence of SEQ ID NO:3297, and a light chain having an amino acid sequence having at least 95% identity to an amino acid sequence of SEQ ID NO:3298.

[0205] In one aspect, provided herein is an antibody that binds TRDV2, comprising: (i) a VH comprising a VH CDR1, a VH CDR2, and a VH CDR3 having an amino acid sequence of SEQ ID NOs:3299, 3300, and 3301, respectively, and (ii) a VL comprising a VL CDR1, VL CDR2, and VL CDR3 having an amino acid sequence of SEQ ID NOs:3302, 3303, and 3304, respectively. In one aspect, provided herein is an antibody that binds TRDV2, comprising: (i) a VH comprising a VH CDR1, a VH CDR2, and a VH CDR3 having an amino acid sequence of SEQ ID NOs:3305, 3306, and 3307, respectively, and (ii) a VL comprising a VL CDR1, VL CDR2, and VL CDR3 having an amino acid sequence of SEQ ID NOs:3308, 3309, and 3310, respectively. In one aspect, provided herein is an antibody that binds TRDV2, comprising: (i) a VH comprising a VH CDR1, a VH CDR2, and a VH CDR3 having an amino acid sequence of SEQ ID NOs:3311, 3312, and 3313, respectively, and (ii) a VL comprising a VL CDR1, VL CDR2, and VL CDR3 having an amino acid sequence of SEQ ID NOs:3314, 3315, and 3316, respectively. In one aspect, provided herein is an antibody that binds TRDV2, comprising: (i) a VH comprising a VH CDR1, a VH CDR2, and a VH CDR3 having an amino acid sequence of SEQ ID NOs:3317, 3318, and 3319, respectively, and (ii) a VL comprising a VL CDR1, VL CDR2, and VL CDR3 having an amino acid sequence of SEQ ID NOs:3320, 3321, and 3322, respectively. In one aspect, provided herein is an antibody that binds TRDV2, comprising: (i) a VH comprising a VH CDR1, a VH CDR2, and a VH CDR3 having an amino acid sequence of SEQ ID NOs:3323, 3324, and 3325, respectively, and (ii) a VL comprising a VL CDR1, VL CDR2, and VL CDR3 having an amino acid sequence of SEQ ID NOs:3326, 3327, and 3328, respectively. In one aspect, provided herein is an antibody that binds TRDV2, comprising: (i) a VH comprising a VH CDR1, a VH CDR2, and a VH CDR3 having an amino acid sequence of a VH CDR1, a VH CDR2, and a VH CDR3, respectively, of a VH having an amino acid sequence of SEQ ID NO:3329; and (ii) a VL comprising a VL CDR1, a VL CDR2, and a VL CDR3 having an amino acid sequence of a VL CDR1, a VL CDR2, and a VL CDR3, respectively, of SEQ ID NO:3330. In one aspect, provided herein is an antibody that binds TRDV2, comprising a VH having an amino acid sequence of SEQ ID NO:3329. In one aspect, provided herein is an antibody that binds TRDV2, comprising a VL having an amino acid sequence of SEQ ID NO:3330. In one aspect, provided herein is an antibody that binds TRDV2, comprising a VH having an amino acid sequence of SEQ ID NO:3329, and a VL having an amino acid sequence of SEQ ID NO:3330. In one aspect, provided herein is an antibody that binds TRDV2, comprising a heavy chain having an amino acid sequence of SEQ ID NO:3331. In one aspect, provided herein is an antibody that binds TRDV2, comprising a light chain having an amino acid sequence of SEQ ID NO:3332. In one aspect, provided herein is an antibody that binds TRDV2, comprising a heavy chain having an amino acid sequence of SEQ ID NO:3331, and a light chain having an amino acid sequence of SEQ ID NO:3332. In one aspect, provided herein is an antibody that binds TRDV2, comprising a VH having an amino acid sequence having at least 95% identity to an amino acid sequence of SEQ ID NO:3329. In one aspect, provided herein is an antibody that binds TRDV2, comprising a VL having an amino acid sequence having at least 95% identity to an amino acid sequence of SEQ ID NO:3330. In one aspect, provided herein is an antibody that binds TRDV2, comprising a VH having an amino acid sequence having at least 95% identity to an amino acid sequence of SEQ ID NO:3329, and a VL having an amino acid sequence having at least 95% identity to an amino acid sequence of SEQ ID NO:3330. In one aspect, provided herein is an antibody that binds TRDV2, comprising a heavy chain having an amino acid sequence having at least 95% identity to an amino acid sequence of SEQ ID NO:3331. In one aspect, provided herein is an antibody that binds TRDV2, comprising a light chain having an amino acid sequence having at least 95% identity to an amino acid sequence of SEQ ID NO:3332. In one aspect, provided herein is an antibody that binds TRDV2, comprising a heavy chain having an amino acid sequence having at least 95% identity to an amino acid sequence of SEQ ID NO:3331, and a light chain having an amino acid sequence having at least 95% identity to an amino acid sequence of SEQ ID NO:3332.

[0206] In one aspect, provided herein is an antibody that binds TRDV2, comprising: (i) a VH comprising a VH CDR1, a VH CDR2, and a VH CDR3 having an amino acid sequence of SEQ ID NOs:3333, 3334, and 3335, respectively, and (ii) a VL comprising a VL CDR1, VL CDR2, and VL CDR3 having an amino acid sequence of SEQ ID NOs:3336, 3337, and 3338, respectively. In one aspect, provided herein is an antibody that binds TRDV2, comprising: (i) a VH comprising a VH CDR1, a VH CDR2, and a VH CDR3 having an amino acid sequence of SEQ ID NOs:3339, 3340, and 3341, respectively, and (ii) a VL comprising a VL CDR1, VL CDR2, and VL CDR3 having an amino acid sequence of SEQ ID NOs:3342, 3343, and 3344, respectively. In one aspect, provided herein is an antibody that binds TRDV2, comprising: (i) a VH comprising a VH CDR1, a VH CDR2, and a VH CDR3 having an amino acid sequence of SEQ ID NOs:3345, 3346, and 3347, respectively, and (ii) a VL comprising a VL CDR1, VL CDR2, and VL CDR3 having an amino acid sequence of SEQ ID NOs:3348, 3349, and 3350, respectively. In one aspect, provided herein is an antibody that binds TRDV2, comprising: (i) a VH comprising a VH CDR1, a VH CDR2, and a VH CDR3 having an amino acid sequence of SEQ ID NOs:3351, 3352, and 3353, respectively, and (ii) a VL comprising a VL CDR1, VL CDR2, and VL CDR3 having an amino acid sequence of SEQ ID NOs:3354, 3355, and 3356, respectively. In one aspect, provided herein is an antibody that binds TRDV2, comprising: (i) a VH comprising a VH CDR1, a VH CDR2, and a VH CDR3 having an amino acid sequence of SEQ ID NOs:3357, 3358, and 3359, respectively, and (ii) a VL comprising a VL CDR1, VL CDR2, and VL CDR3 having an amino acid sequence of SEQ ID NOs:3360, 3361, and 3362, respectively. In one aspect, provided herein is an antibody that binds TRDV2, comprising: (i) a VH comprising a VH CDR1, a VH CDR2, and a VH CDR3 having an amino acid sequence of a VH CDR1, a VH CDR2, and a VH CDR3, respectively, of a VH having an amino acid sequence of SEQ ID NO:3363; and (ii) a VL comprising a VL CDR1, a VL CDR2, and a VL CDR3 having an amino acid sequence of a VL CDR1, a VL CDR2, and a VL CDR3, respectively, of SEQ ID NO:3364. In one aspect, provided herein is an antibody that binds TRDV2, comprising a VH having an amino acid sequence of SEQ ID NO:3363. In one aspect, provided herein is an antibody that binds TRDV2, comprising a VL having an amino acid sequence of SEQ ID NO:3364. In one aspect, provided herein is an antibody that binds TRDV2, comprising a VH having an amino acid sequence of SEQ ID NO:3363, and a VL having an amino acid sequence of SEQ ID NO:3364. In one aspect, provided herein is an antibody that binds TRDV2, comprising a heavy chain having an amino acid sequence of SEQ ID NO:3365. In one aspect, provided herein is an antibody that binds TRDV2, comprising a light chain having an amino acid sequence of SEQ ID NO:3366. In one aspect, provided herein is an antibody that binds TRDV2, comprising a heavy chain having an amino acid sequence of SEQ ID NO:3365, and a light chain having an amino acid sequence of SEQ ID NO:3366. In one aspect, provided herein is an antibody that binds TRDV2, comprising a VH having an amino acid sequence having at least 95% identity to an amino acid sequence of SEQ ID NO:3363. In one aspect, provided herein is an antibody that binds TRDV2, comprising a VL having an amino acid sequence having at least 95% identity to an amino acid sequence of SEQ ID NO:3364. In one aspect, provided herein is an antibody that binds TRDV2, comprising a VH having an amino acid sequence having at least 95% identity to an amino acid sequence of SEQ ID NO:3363, and a VL having an amino acid sequence having at least 95% identity to an amino acid sequence of SEQ ID NO:3364. In one aspect, provided herein is an antibody that binds TRDV2, comprising a heavy chain having an amino acid sequence having at least 95% identity to an amino acid sequence of SEQ ID NO:3365. In one aspect, provided herein is an antibody that binds TRDV2, comprising a light chain having an amino acid sequence having at least 95% identity to an amino acid sequence of SEQ ID NO:3366. In one aspect, provided herein is an antibody that binds TRDV2, comprising a heavy chain having an amino acid sequence having at least 95% identity to an amino acid sequence of SEQ ID NO:3365, and a light chain having an amino acid sequence having at least 95% identity to an amino acid sequence of SEQ ID NO:3366.

[0207] In one aspect, provided herein is an antibody that binds TRDV2, comprising: (i) a VH comprising a VH CDR1, a VH CDR2, and a VH CDR3 having an amino acid sequence of SEQ ID NOs:3367, 3368, and 3369, respectively, and (ii) a VL comprising a VL CDR1, VL CDR2, and VL CDR3 having an amino acid sequence of SEQ ID NOs:3370, 3371, and 3372, respectively. In one aspect, provided herein is an antibody that binds TRDV2, comprising: (i) a VH comprising a VH CDR1, a VH CDR2, and a VH CDR3 having an amino acid sequence of SEQ ID NOs:3373, 3374, and 3375, respectively, and (ii) a VL comprising a VL CDR1, VL CDR2, and VL CDR3 having an amino acid sequence of SEQ ID NOs:3376, 3377, and 3378, respectively. In one aspect, provided herein is an antibody that binds TRDV2, comprising: (i) a VH comprising a VH CDR1, a VH CDR2, and a VH CDR3 having an amino acid sequence of SEQ ID NOs:3379, 3380, and 3381, respectively, and (ii) a VL comprising a VL CDR1, VL CDR2, and VL CDR3 having an amino acid sequence of SEQ ID NOs:3382, 3383, and 3384, respectively. In one aspect, provided herein is an antibody that binds TRDV2, comprising: (i) a VH comprising a VH CDR1, a VH CDR2, and a VH CDR3 having an amino acid sequence of SEQ ID NOs:3385, 3386, and 3387, respectively, and (ii) a VL comprising a VL CDR1, VL CDR2, and VL CDR3 having an amino acid sequence of SEQ ID NOs:3388, 3389, and 3390, respectively. In one aspect, provided herein is an antibody that binds TRDV2, comprising: (i) a VH comprising a VH CDR1, a VH CDR2, and a VH CDR3 having an amino acid sequence of SEQ ID NOs:3391, 3392, and 3393, respectively, and (ii) a VL comprising a VL CDR1, VL CDR2, and VL CDR3 having an amino acid sequence of SEQ ID NOs:3394, 3395, and 3396, respectively. In one aspect, provided herein is an antibody that binds TRDV2, comprising: (i) a VH comprising a VH CDR1, a VH CDR2, and a VH CDR3 having an amino acid sequence of a VH CDR1, a VH CDR2, and a VH CDR3, respectively, of a VH having an amino acid sequence of SEQ ID NO:3397; and (ii) a VL comprising a VL CDR1, a VL CDR2, and a VL CDR3 having an amino acid sequence of a VL CDR1, a VL CDR2, and a VL CDR3, respectively, of SEQ ID NO:3398. In one aspect, provided herein is an antibody that binds TRDV2, comprising a VH having an amino acid sequence of SEQ ID NO:3397. In one aspect, provided herein is an antibody that binds TRDV2, comprising a VL having an amino acid sequence of SEQ ID NO:3398. In one aspect, provided herein is an antibody that binds TRDV2, comprising a VH having an amino acid sequence of SEQ ID NO:3397, and a VL having an amino acid sequence of SEQ ID NO:3398. In one aspect, provided herein is an antibody that binds TRDV2, comprising a heavy chain having an amino acid sequence of SEQ ID NO:3399. In one aspect, provided herein is an antibody that binds TRDV2, comprising a light chain having an amino acid sequence of SEQ ID NO:3400. In one aspect, provided herein is an antibody that binds TRDV2, comprising a heavy chain having an amino acid sequence of SEQ ID NO:3399, and a light chain having an amino acid sequence of SEQ ID NO:3400. In one aspect, provided herein is an antibody that binds TRDV2, comprising a VH having an amino acid sequence having at least 95% identity to an amino acid sequence of SEQ ID NO:3397. In one aspect, provided herein is an antibody that binds TRDV2, comprising a VL having an amino acid sequence having at least 95% identity to an amino acid sequence of SEQ ID NO:3398. In one aspect, provided herein is an antibody that binds TRDV2, comprising a VH having an amino acid sequence having at least 95% identity to an amino acid sequence of SEQ ID NO:3397, and a VL having an amino acid sequence having at least 95% identity to an amino acid sequence of SEQ ID NO:3398. In one aspect, provided herein is an antibody that binds TRDV2, comprising a heavy chain having an amino acid sequence having at least 95% identity to an amino acid sequence of SEQ ID NO:3399. In one aspect, provided herein is an antibody that binds TRDV2, comprising a light chain having an amino acid sequence having at least 95% identity to an amino acid sequence of SEQ ID NO:3400. In one aspect, provided herein is an antibody that binds TRDV2, comprising a heavy chain having an amino acid sequence having at least 95% identity to an amino acid sequence of SEQ ID NO:3399, and a light chain having an amino acid sequence having at least 95% identity to an amino acid sequence of SEQ ID NO:3400.

[0208] In one aspect, provided herein is an antibody that binds TRDV2, comprising: (i) a VH comprising a VH CDR1, a VH CDR2, and a VH CDR3 having an amino acid sequence of SEQ ID NOs:3401, 3402, and 3403, respectively, and (ii) a VL comprising a VL CDR1, VL CDR2, and VL CDR3 having an amino acid sequence of SEQ ID NOs:3404, 3405, and 3406, respectively. In one aspect, provided herein is an antibody that binds TRDV2, comprising: (i) a VH comprising a VH CDR1, a VH CDR2, and a VH CDR3 having an amino acid sequence of SEQ ID NOs:3407, 3408, and 3409, respectively, and (ii) a VL comprising a VL CDR1, VL CDR2, and VL CDR3 having an amino acid sequence of SEQ ID NOs:3410, 3411, and 3412, respectively. In one aspect, provided herein is an antibody that binds TRDV2, comprising: (i) a VH comprising a VH CDR1, a VH CDR2, and a VH CDR3 having an amino acid sequence of SEQ ID NOs:3413, 3414, and 3415, respectively, and (ii) a VL comprising a VL CDR1, VL CDR2, and VL CDR3 having an amino acid sequence of SEQ ID NOs:3416, 3417, and 3418, respectively. In one aspect, provided herein is an antibody that binds TRDV2, comprising: (i) a VH comprising a VH CDR1, a VH CDR2, and a VH CDR3 having an amino acid sequence of SEQ ID NOs:3419, 3420, and 3421, respectively, and (ii) a VL comprising a VL CDR1, VL CDR2, and VL CDR3 having an amino acid sequence of SEQ ID NOs:3422, 3423, and 3424, respectively. In one aspect, provided herein is an antibody that binds TRDV2, comprising: (i) a VH comprising a VH CDR1, a VH CDR2, and a VH CDR3 having an amino acid sequence of SEQ ID NOs:3425, 3426, and 3427, respectively, and (ii) a VL comprising a VL CDR1, VL CDR2, and VL CDR3 having an amino acid sequence of SEQ ID NOs:3428, 3429, and 3430, respectively. In one aspect, provided herein is an antibody that binds TRDV2, comprising: (i) a VH comprising a VH CDR1, a VH CDR2, and a VH CDR3 having an amino acid sequence of a VH CDR1, a VH CDR2, and a VH CDR3, respectively, of a VH having an amino acid sequence of SEQ ID NO:3431; and (ii) a VL comprising a VL CDR1, a VL CDR2, and a VL CDR3 having an amino acid sequence of a VL CDR1, a VL CDR2, and a VL CDR3, respectively, of SEQ ID NO:3432. In one aspect, provided herein is an antibody that binds TRDV2, comprising a VH having an amino acid sequence of SEQ ID NO:3431. In one aspect, provided herein is an antibody that binds TRDV2, comprising a VL having an amino acid sequence of SEQ ID NO:3432. In one aspect, provided herein is an antibody that binds TRDV2, comprising a VH having an amino acid sequence of SEQ ID NO:3431, and a VL having an amino acid sequence of SEQ ID NO:3432. In one aspect, provided herein is an antibody that binds TRDV2, comprising a heavy chain having an amino acid sequence of SEQ ID NO:3433. In one aspect, provided herein is an antibody that binds TRDV2, comprising a light chain having an amino acid sequence of SEQ ID NO:3434. In one aspect, provided herein is an antibody that binds TRDV2, comprising a heavy chain having an amino acid sequence of SEQ ID NO:3433, and a light chain having an amino acid sequence of SEQ ID NO:3434. In one aspect, provided herein is an antibody that binds TRDV2, comprising a VH having an amino acid sequence having at least 95% identity to an amino acid sequence of SEQ ID NO:3431. In one aspect, provided herein is an antibody that binds TRDV2, comprising a VL having an amino acid sequence having at least 95% identity to an amino acid sequence of SEQ ID NO:3432. In one aspect, provided herein is an antibody that binds TRDV2, comprising a VH having an amino acid sequence having at least 95% identity to an amino acid sequence of SEQ ID NO:3431, and a VL having an amino acid sequence having at least 95% identity to an amino acid sequence of SEQ ID NO:3432. In one aspect, provided herein is an antibody that binds TRDV2, comprising a heavy chain having an amino acid sequence having at least 95% identity to an amino acid sequence of SEQ ID NO:3433. In one aspect, provided herein is an antibody that binds TRDV2, comprising a light chain having an amino acid sequence having at least 95% identity to an amino acid sequence of SEQ ID NO:3434. In one aspect, provided herein is an antibody that binds TRDV2, comprising a heavy chain having an amino acid sequence having at least 95% identity to an amino acid sequence of SEQ ID NO:3433, and a light chain having an amino acid sequence having at least 95% identity to an amino acid sequence of SEQ ID NO:3434.

[0209] In one aspect, provided herein is an antibody that binds TRDV2, comprising: (i) a VH comprising a VH CDR1, a VH CDR2, and a VH CDR3 having an amino acid sequence of SEQ ID NOs:3435, 3436, and 3437, respectively, and (ii) a VL comprising a VL CDR1, VL CDR2, and VL CDR3 having an amino acid sequence of SEQ ID NOs:3438, 3439, and 3440, respectively. In one aspect, provided herein is an antibody that binds TRDV2, comprising: (i) a VH comprising a VH CDR1, a VH CDR2, and a VH CDR3 having an amino acid sequence of SEQ ID NOs:3441, 3442, and 3443, respectively, and (ii) a VL comprising a VL CDR1, VL CDR2, and VL CDR3 having an amino acid sequence of SEQ ID NOs:3444, 3445, and 3446, respectively. In one aspect, provided herein is an antibody that binds TRDV2, comprising: (i) a VH comprising a VH CDR1, a VH CDR2, and a VH CDR3 having an amino acid sequence of SEQ ID NOs:3447, 3448, and 3449, respectively, and (ii) a VL comprising a VL CDR1, VL CDR2, and VL CDR3 having an amino acid sequence of SEQ ID NOs:3450, 3451, and 3452, respectively. In one aspect, provided herein is an antibody that binds TRDV2, comprising: (i) a VH comprising a VH CDR1, a VH CDR2, and a VH CDR3 having an amino acid sequence of SEQ ID NOs:3453, 3454, and 3455, respectively, and (ii) a VL comprising a VL CDR1, VL CDR2, and VL CDR3 having an amino acid sequence of SEQ ID NOs:3456, 3457, and 3458, respectively. In one aspect, provided herein is an antibody that binds TRDV2, comprising: (i) a VH comprising a VH CDR1, a VH CDR2, and a VH CDR3 having an amino acid sequence of SEQ ID NOs:3459, 3460, and 3461, respectively, and (ii) a VL comprising a VL CDR1, VL CDR2, and VL CDR3 having an amino acid sequence of SEQ ID NOs:3462, 3463, and 3464, respectively. In one aspect, provided herein is an antibody that binds TRDV2, comprising: (i) a VH comprising a VH CDR1, a VH CDR2, and a VH CDR3 having an amino acid sequence of a VH CDR1, a VH CDR2, and a VH CDR3, respectively, of a VH having an amino acid sequence of SEQ ID NO:3465; and (ii) a VL comprising a VL CDR1, a VL CDR2, and a VL CDR3 having an amino acid sequence of a VL CDR1, a VL CDR2, and a VL CDR3, respectively, of SEQ ID NO:3466. In one aspect, provided herein is an antibody that binds TRDV2, comprising a VH having an amino acid sequence of SEQ ID NO:3465. In one aspect, provided herein is an antibody that binds TRDV2, comprising a VL having an amino acid sequence of SEQ ID NO:3466. In one aspect, provided herein is an antibody that binds TRDV2, comprising a VH having an amino acid sequence of SEQ ID NO:3465, and a VL having an amino acid sequence of SEQ ID NO:3466. In one aspect, provided herein is an antibody that binds TRDV2, comprising a heavy chain having an amino acid sequence of SEQ ID NO:3467. In one aspect, provided herein is an antibody that binds TRDV2, comprising a light chain having an amino acid sequence of SEQ ID NO:3468. In one aspect, provided herein is an antibody that binds TRDV2, comprising a heavy chain having an amino acid sequence of SEQ ID NO:3467, and a light chain having an amino acid sequence of SEQ ID NO:3468. In one aspect, provided herein is an antibody that binds TRDV2, comprising a VH having an amino acid sequence having at least 95% identity to an amino acid sequence of SEQ ID NO:3465. In one aspect, provided herein is an antibody that binds TRDV2, comprising a VL having an amino acid sequence having at least 95% identity to an amino acid sequence of SEQ ID NO:3466. In one aspect, provided herein is an antibody that binds TRDV2, comprising a VH having an amino acid sequence having at least 95% identity to an amino acid sequence of SEQ ID NO:3465, and a VL having an amino acid sequence having at least 95% identity to an amino acid sequence of SEQ ID NO:3466. In one aspect, provided herein is an antibody that binds TRDV2, comprising a heavy chain having an amino acid sequence having at least 95% identity to an amino acid sequence of SEQ ID NO:3467. In one aspect, provided herein is an antibody that binds TRDV2, comprising a light chain having an amino acid sequence having at least 95% identity to an amino acid sequence of SEQ ID NO:3468. In one aspect, provided herein is an antibody that binds TRDV2, comprising a heavy chain having an amino acid sequence having at least 95% identity to an amino acid sequence of SEQ ID NO:3467, and a light chain having an amino acid sequence having at least 95% identity to an amino acid sequence of SEQ ID NO:3468.

[0210] In one aspect, provided herein is an antibody that binds TRDV2, comprising: (i) a VH comprising a VH CDR1, a VH CDR2, and a VH CDR3 having an amino acid sequence of SEQ ID NOs:3469, 3470, and 3471, respectively, and (ii) a VL comprising a VL CDR1, VL CDR2, and VL CDR3 having an amino acid sequence of SEQ ID NOs:3472, 3473, and 3474, respectively. In one aspect, provided herein is an antibody that binds TRDV2, comprising: (i) a VH comprising a VH CDR1, a VH CDR2, and a VH CDR3 having an amino acid sequence of SEQ ID NOs:3475, 3476, and 3477, respectively, and (ii) a VL comprising a VL CDR1, VL CDR2, and VL CDR3 having an amino acid sequence of SEQ ID NOs:3478, 3479, and 3480, respectively. In one aspect, provided herein is an antibody that binds TRDV2, comprising: (i) a VH comprising a VH CDR1, a VH CDR2, and a VH CDR3 having an amino acid sequence of SEQ ID NOs:3481, 3482, and 3483, respectively, and (ii) a VL comprising a VL CDR1, VL CDR2, and VL CDR3 having an amino acid sequence of SEQ ID NOs:3484, 3485, and 3486, respectively. In one aspect, provided herein is an antibody that binds TRDV2, comprising: (i) a VH comprising a VH CDR1, a VH CDR2, and a VH CDR3 having an amino acid sequence of SEQ ID NOs:3487, 3488, and 3489, respectively, and (ii) a VL comprising a VL CDR1, VL CDR2, and VL CDR3 having an amino acid sequence of SEQ ID NOs:3490, 3491, and 3492, respectively. In one aspect, provided herein is an antibody that binds TRDV2, comprising: (i) a VH comprising a VH CDR1, a VH CDR2, and a VH CDR3 having an amino acid sequence of SEQ ID NOs:3493, 3494, and 3495, respectively, and (ii) a VL comprising a VL CDR1, VL CDR2, and VL CDR3 having an amino acid sequence of SEQ ID NOs:3496, 3497, and 3498, respectively. In one aspect, provided herein is an antibody that binds TRDV2, comprising: (i) a VH comprising a VH CDR1, a VH CDR2, and a VH CDR3 having an amino acid sequence of a VH CDR1, a VH CDR2, and a VH CDR3, respectively, of a VH having an amino acid sequence of SEQ ID NO:3499; and (ii) a VL comprising a VL CDR1, a VL CDR2, and a VL CDR3 having an amino acid sequence of a VL CDR1, a VL CDR2, and a VL CDR3, respectively, of SEQ ID NO:3500. In one aspect, provided herein is an antibody that binds TRDV2, comprising a VH having an amino acid sequence of SEQ ID NO:3499. In one aspect, provided herein is an antibody that binds TRDV2, comprising a VL having an amino acid sequence of SEQ ID NO:3500. In one aspect, provided herein is an antibody that binds TRDV2, comprising a VH having an amino acid sequence of SEQ ID NO:3499, and a VL having an amino acid sequence of SEQ ID NO:3500. In one aspect, provided herein is an antibody that binds TRDV2, comprising a heavy chain having an amino acid sequence of SEQ ID NO:3501. In one aspect, provided herein is an antibody that binds TRDV2, comprising a light chain having an amino acid sequence of SEQ ID NO:3502. In one aspect, provided herein is an antibody that binds TRDV2, comprising a heavy chain having an amino acid sequence of SEQ ID NO:3501, and a light chain having an amino acid sequence of SEQ ID NO:3502. In one aspect, provided herein is an antibody that binds TRDV2, comprising a VH having an amino acid sequence having at least 95% identity to an amino acid sequence of SEQ ID NO:3499. In one aspect, provided herein is an antibody that binds TRDV2, comprising a VL having an amino acid sequence having at least 95% identity to an amino acid sequence of SEQ ID NO:3500. In one aspect, provided herein is an antibody that binds TRDV2, comprising a VH having an amino acid sequence having at least 95% identity to an amino acid sequence of SEQ ID NO:3499, and a VL having an amino acid sequence having at least 95% identity to an amino acid sequence of SEQ ID NO:3500. In one aspect, provided herein is an antibody that binds TRDV2, comprising a heavy chain having an amino acid sequence having at least 95% identity to an amino acid sequence of SEQ ID NO:3501. In one aspect, provided herein is an antibody that binds TRDV2, comprising a light chain having an amino acid sequence having at least 95% identity to an amino acid sequence of SEQ ID NO:3502. In one aspect, provided herein is an antibody that binds TRDV2, comprising a heavy chain having an amino acid sequence having at least 95% identity to an amino acid sequence of SEQ ID NO:3501, and a light chain having an amino acid sequence having at least 95% identity to an amino acid sequence of SEQ ID NO:3502.

[0211] In one aspect, provided herein is an antibody that binds TRDV2, comprising: (i) a VH comprising a VH CDR1, a VH CDR2, and a VH CDR3 having an amino acid sequence of SEQ ID NOs:3503, 3504, and 3505, respectively, and (ii) a VL comprising a VL CDR1, VL CDR2, and VL CDR3 having an amino acid sequence of SEQ ID NOs:3506, 3507, and 3508, respectively. In one aspect, provided herein is an antibody that binds TRDV2, comprising: (i) a VH comprising a VH CDR1, a VH CDR2, and a VH CDR3 having an amino acid sequence of SEQ ID NOs:3509, 3510, and 3511, respectively, and (ii) a VL comprising a VL CDR1, VL CDR2, and VL CDR3 having an amino acid sequence of SEQ ID NOs:3512, 3513, and 3514, respectively. In one aspect, provided herein is an antibody that binds TRDV2, comprising: (i) a VH comprising a VH CDR1, a VH CDR2, and a VH CDR3 having an amino acid sequence of SEQ ID NOs:3515, 3516, and 3517, respectively, and (ii) a VL comprising a VL CDR1, VL CDR2, and VL CDR3 having an amino acid sequence of SEQ ID NOs:3518, 3519, and 3520, respectively. In one aspect, provided herein is an antibody that binds TRDV2, comprising: (i) a VH comprising a VH CDR1, a VH CDR2, and a VH CDR3 having an amino acid sequence of SEQ ID NOs:3521, 3522, and 3523, respectively, and (ii) a VL comprising a VL CDR1, VL CDR2, and VL CDR3 having an amino acid sequence of SEQ ID NOs:3524, 3525, and 3526, respectively. In one aspect, provided herein is an antibody that binds TRDV2, comprising: (i) a VH comprising a VH CDR1, a VH CDR2, and a VH CDR3 having an amino acid sequence of SEQ ID NOs:3527, 3528, and 3529, respectively, and (ii) a VL comprising a VL CDR1, VL CDR2, and VL CDR3 having an amino acid sequence of SEQ ID NOs:3530, 3531, and 3532, respectively. In one aspect, provided herein is an antibody that binds TRDV2, comprising: (i) a VH comprising a VH CDR1, a VH CDR2, and a VH CDR3 having an amino acid sequence of a VH CDR1, a VH CDR2, and a VH CDR3, respectively, of a VH having an amino acid sequence of SEQ ID NO:3533; and (ii) a VL comprising a VL CDR1, a VL CDR2, and a VL CDR3 having an amino acid sequence of a VL CDR1, a VL CDR2, and a VL CDR3, respectively, of SEQ ID NO:3534. In one aspect, provided herein is an antibody that binds TRDV2, comprising a VH having an amino acid sequence of SEQ ID NO:3533. In one aspect, provided herein is an antibody that binds TRDV2, comprising a VL having an amino acid sequence of SEQ ID NO:3534. In one aspect, provided herein is an antibody that binds TRDV2, comprising a VH having an amino acid sequence of SEQ ID NO:3533, and a VL having an amino acid sequence of SEQ ID NO:3534. In one aspect, provided herein is an antibody that binds TRDV2, comprising a heavy chain having an amino acid sequence of SEQ ID NO:3535. In one aspect, provided herein is an antibody that binds TRDV2, comprising a light chain having an amino acid sequence of SEQ ID NO:3536. In one aspect, provided herein is an antibody that binds TRDV2, comprising a heavy chain having an amino acid sequence of SEQ ID NO:3535, and a light chain having an amino acid sequence of SEQ ID NO:3536. In one aspect, provided herein is an antibody that binds TRDV2, comprising a VH having an amino acid sequence having at least 95% identity to an amino acid sequence of SEQ ID NO:3533. In one aspect, provided herein is an antibody that binds TRDV2, comprising a VL having an amino acid sequence having at least 95% identity to an amino acid sequence of SEQ ID NO:3534. In one aspect, provided herein is an antibody that binds TRDV2, comprising a VH having an amino acid sequence having at least 95% identity to an amino acid sequence of SEQ ID NO:3533, and a VL having an amino acid sequence having at least 95% identity to an amino acid sequence of SEQ ID NO:3534. In one aspect, provided herein is an antibody that binds TRDV2, comprising a heavy chain having an amino acid sequence having at least 95% identity to an amino acid sequence of SEQ ID NO:3535. In one aspect, provided herein is an antibody that binds TRDV2, comprising a light chain having an amino acid sequence having at least 95% identity to an amino acid sequence of SEQ ID NO:3536. In one aspect, provided herein is an antibody that binds TRDV2, comprising a heavy chain having an amino acid sequence having at least 95% identity to an amino acid sequence of SEQ ID NO:3535, and a light chain having an amino acid sequence having at least 95% identity to an amino acid sequence of SEQ ID NO:3536.

[0212] In one aspect, provided herein is an antibody that binds TRDV2, comprising: (i) a VH comprising a VH CDR1, a VH CDR2, and a VH CDR3 having an amino acid sequence of SEQ ID NOs:3537, 3538, and 3539, respectively, and (ii) a VL comprising a VL CDR1, VL CDR2, and VL CDR3 having an amino acid sequence of SEQ ID NOs:3540, 3541, and 3542, respectively. In one aspect, provided herein is an antibody that binds TRDV2, comprising: (i) a VH comprising a VH CDR1, a VH CDR2, and a VH CDR3 having an amino acid sequence of SEQ ID NOs:3543, 3544, and 3545, respectively, and (ii) a VL comprising a VL CDR1, VL CDR2, and VL CDR3 having an amino acid sequence of SEQ ID NOs:3546, 3547, and 3548, respectively. In one aspect, provided herein is an antibody that binds TRDV2, comprising: (i) a VH comprising a VH CDR1, a VH CDR2, and a VH CDR3 having an amino acid sequence of SEQ ID NOs:3549, 3550, and 3551, respectively, and (ii) a VL comprising a VL CDR1, VL CDR2, and VL CDR3 having an amino acid sequence of SEQ ID NOs:3552, 3553, and 3554, respectively. In one aspect, provided herein is an antibody that binds TRDV2, comprising: (i) a VH comprising a VH CDR1, a VH CDR2, and a VH CDR3 having an amino acid sequence of SEQ ID NOs:3555, 3556, and 3557, respectively, and (ii) a VL comprising a VL CDR1, VL CDR2, and VL CDR3 having an amino acid sequence of SEQ ID NOs:3558, 3559, and 3560, respectively. In one aspect, provided herein is an antibody that binds TRDV2, comprising: (i) a VH comprising a VH CDR1, a VH CDR2, and a VH CDR3 having an amino acid sequence of SEQ ID NOs:3561, 3562, and 3563, respectively, and (ii) a VL comprising a VL CDR1, VL CDR2, and VL CDR3 having an amino acid sequence of SEQ ID NOs:3564, 3565, and 3566, respectively. In one aspect, provided herein is an antibody that binds TRDV2, comprising: (i) a VH comprising a VH CDR1, a VH CDR2, and a VH CDR3 having an amino acid sequence of a VH CDR1, a VH CDR2, and a VH CDR3, respectively, of a VH having an amino acid sequence of SEQ ID NO:3567; and (ii) a VL comprising a VL CDR1, a VL CDR2, and a VL CDR3 having an amino acid sequence of a VL CDR1, a VL CDR2, and a VL CDR3, respectively, of SEQ ID NO:3568. In one aspect, provided herein is an antibody that binds TRDV2, comprising a VH having an amino acid sequence of SEQ ID NO:3567. In one aspect, provided herein is an antibody that binds TRDV2, comprising a VL having an amino acid sequence of SEQ ID NO:3568. In one aspect, provided herein is an antibody that binds TRDV2, comprising a VH having an amino acid sequence of SEQ ID NO:3567, and a VL having an amino acid sequence of SEQ ID NO:3568. In one aspect, provided herein is an antibody that binds TRDV2, comprising a heavy chain having an amino acid sequence of SEQ ID NO:3569. In one aspect, provided herein is an antibody that binds TRDV2, comprising a light chain having an amino acid sequence of SEQ ID NO:3570. In one aspect, provided herein is an antibody that binds TRDV2, comprising a heavy chain having an amino acid sequence of SEQ ID NO:3569, and a light chain having an amino acid sequence of SEQ ID NO:3570. In one aspect, provided herein is an antibody that binds TRDV2, comprising a VH having an amino acid sequence having at least 95% identity to an amino acid sequence of SEQ ID NO:3567. In one aspect, provided herein is an antibody that binds TRDV2, comprising a VL having an amino acid sequence having at least 95% identity to an amino acid sequence of SEQ ID NO:3568. In one aspect, provided herein is an antibody that binds TRDV2, comprising a VH having an amino acid sequence having at least 95% identity to an amino acid sequence of SEQ ID NO:3567, and a VL having an amino acid sequence having at least 95% identity to an amino acid sequence of SEQ ID NO:3568. In one aspect, provided herein is an antibody that binds TRDV2, comprising a heavy chain having an amino acid sequence having at least 95% identity to an amino acid sequence of SEQ ID NO:3569. In one aspect, provided herein is an antibody that binds TRDV2, comprising a light chain having an amino acid sequence having at least 95% identity to an amino acid sequence of SEQ ID NO:3570. In one aspect, provided herein is an antibody that binds TRDV2, comprising a heavy chain having an amino acid sequence having at least 95% identity to an amino acid sequence of SEQ ID NO:3569, and a light chain having an amino acid sequence having at least 95% identity to an amino acid sequence of SEQ ID NO:3570.

[0213] In one aspect, provided herein is an antibody that binds TRDV2, comprising: (i) a VH comprising a VH CDR1, a VH CDR2, and a VH CDR3 having an amino acid sequence of SEQ ID NOs:3571, 3572, and 3573, respectively, and (ii) a VL comprising a VL CDR1, VL CDR2, and VL CDR3 having an amino acid sequence of SEQ ID NOs:3574, 3575, and 3576, respectively. In one aspect, provided herein is an antibody that binds TRDV2, comprising: (i) a VH comprising a VH CDR1, a VH CDR2, and a VH CDR3 having an amino acid sequence of SEQ ID NOs:3577, 3578, and 3579, respectively, and (ii) a VL comprising a VL CDR1, VL CDR2, and VL CDR3 having an amino acid sequence of SEQ ID NOs:3580, 3581, and 3582, respectively. In one aspect, provided herein is an antibody that binds TRDV2, comprising: (i) a VH comprising a VH CDR1, a VH CDR2, and a VH CDR3 having an amino acid sequence of SEQ ID NOs:3583, 3584, and 3585, respectively, and (ii) a VL comprising a VL CDR1, VL CDR2, and VL CDR3 having an amino acid sequence of SEQ ID NOs:3586, 3587, and 3588, respectively. In one aspect, provided herein is an antibody that binds TRDV2, comprising: (i) a VH comprising a VH CDR1, a VH CDR2, and a VH CDR3 having an amino acid sequence of SEQ ID NOs:3589, 3590, and 3591, respectively, and (ii) a VL comprising a VL CDR1, VL CDR2, and VL CDR3 having an amino acid sequence of SEQ ID NOs:3592, 3593, and 3594, respectively. In one aspect, provided herein is an antibody that binds TRDV2, comprising: (i) a VH comprising a VH CDR1, a VH CDR2, and a VH CDR3 having an amino acid sequence of SEQ ID NOs:3595, 3596, and 3597, respectively, and (ii) a VL comprising a VL CDR1, VL CDR2, and VL CDR3 having an amino acid sequence of SEQ ID NOs:3598, 3599, and 3600, respectively. In one aspect, provided herein is an antibody that binds TRDV2, comprising: (i) a VH comprising a VH CDR1, a VH CDR2, and a VH CDR3 having an amino acid sequence of a VH CDR1, a VH CDR2, and a VH CDR3, respectively, of a VH having an amino acid sequence of SEQ ID NO:3601; and (ii) a VL comprising a VL CDR1, a VL CDR2, and a VL CDR3 having an amino acid sequence of a VL CDR1, a VL CDR2, and a VL CDR3, respectively, of SEQ ID NO:3602. In one aspect, provided herein is an antibody that binds TRDV2, comprising a VH having an amino acid sequence of SEQ ID NO:3601. In one aspect, provided herein is an antibody that binds TRDV2, comprising a VL having an amino acid sequence of SEQ ID NO:3602. In one aspect, provided herein is an antibody that binds TRDV2, comprising a VH having an amino acid sequence of SEQ ID NO:3601, and a VL having an amino acid sequence of SEQ ID NO:3602. In one aspect, provided herein is an antibody that binds TRDV2, comprising a heavy chain having an amino acid sequence of SEQ ID NO:3603. In one aspect, provided herein is an antibody that binds TRDV2, comprising a light chain having an amino acid sequence of SEQ ID NO:3604. In one aspect, provided herein is an antibody that binds TRDV2, comprising a heavy chain having an amino acid sequence of SEQ ID NO:3603, and a light chain having an amino acid sequence of SEQ ID NO:3604. In one aspect, provided herein is an antibody that binds TRDV2, comprising a VH having an amino acid sequence having at least 95% identity to an amino acid sequence of SEQ ID NO:3601. In one aspect, provided herein is an antibody that binds TRDV2, comprising a VL having an amino acid sequence having at least 95% identity to an amino acid sequence of SEQ ID NO:3602. In one aspect, provided herein is an antibody that binds TRDV2, comprising a VH having an amino acid sequence having at least 95% identity to an amino acid sequence of SEQ ID NO:3601, and a VL having an amino acid sequence having at least 95% identity to an amino acid sequence of SEQ ID NO:3602. In one aspect, provided herein is an antibody that binds TRDV2, comprising a heavy chain having an amino acid sequence having at least 95% identity to an amino acid sequence of SEQ ID NO:3603. In one aspect, provided herein is an antibody that binds TRDV2, comprising a light chain having an amino acid sequence having at least 95% identity to an amino acid sequence of SEQ ID NO:3604. In one aspect, provided herein is an antibody that binds TRDV2, comprising a heavy chain having an amino acid sequence having at least 95% identity to an amino acid sequence of SEQ ID NO:3603, and a light chain having an amino acid sequence having at least 95% identity to an amino acid sequence of SEQ ID NO:3604.

[0214] In one aspect, provided herein is an antibody that binds TRDV2, comprising: (i) a VH comprising a VH CDR1, a VH CDR2, and a VH CDR3 having an amino acid sequence of SEQ ID NOs:3605, 3606, and 3607, respectively, and (ii) a VL comprising a VL CDR1, VL CDR2, and VL CDR3 having an amino acid sequence of SEQ ID NOs:3608, 3609, and 3610, respectively. In one aspect, provided herein is an antibody that binds TRDV2, comprising: (i) a VH comprising a VH CDR1, a VH CDR2, and a VH CDR3 having an amino acid sequence of SEQ ID NOs:3611, 3612, and 3613, respectively, and (ii) a VL comprising a VL CDR1, VL CDR2, and VL CDR3 having an amino acid sequence of SEQ ID NOs:3614, 3615, and 3616, respectively. In one aspect, provided herein is an antibody that binds TRDV2, comprising: (i) a VH comprising a VH CDR1, a VH CDR2, and a VH CDR3 having an amino acid sequence of SEQ ID NOs:3617, 3618, and 3619, respectively, and (ii) a VL comprising a VL CDR1, VL CDR2, and VL CDR3 having an amino acid sequence of SEQ ID NOs:3620, 3621, and 3622, respectively. In one aspect, provided herein is an antibody that binds TRDV2, comprising: (i) a VH comprising a VH CDR1, a VH CDR2, and a VH CDR3 having an amino acid sequence of SEQ ID NOs:3623, 3624, and 3625, respectively, and (ii) a VL comprising a VL CDR1, VL CDR2, and VL CDR3 having an amino acid sequence of SEQ ID NOs:3626, 3627, and 3628, respectively. In one aspect, provided herein is an antibody that binds TRDV2, comprising: (i) a VH comprising a VH CDR1, a VH CDR2, and a VH CDR3 having an amino acid sequence of SEQ ID NOs:3629, 3630, and 3631, respectively, and (ii) a VL comprising a VL CDR1, VL CDR2, and VL CDR3 having an amino acid sequence of SEQ ID NOs:3632, 3633, and 3634, respectively. In one aspect, provided herein is an antibody that binds TRDV2, comprising: (i) a VH comprising a VH CDR1, a VH CDR2, and a VH CDR3 having an amino acid sequence of a VH CDR1, a VH CDR2, and a VH CDR3, respectively, of a VH having an amino acid sequence of SEQ ID NO:3635; and (ii) a VL comprising a VL CDR1, a VL CDR2, and a VL CDR3 having an amino acid sequence of a VL CDR1, a VL CDR2, and a VL CDR3, respectively, of SEQ ID NO:3636. In one aspect, provided herein is an antibody that binds TRDV2, comprising a VH having an amino acid sequence of SEQ ID NO:3635. In one aspect, provided herein is an antibody that binds TRDV2, comprising a VL having an amino acid sequence of SEQ ID NO:3636. In one aspect, provided herein is an antibody that binds TRDV2, comprising a VH having an amino acid sequence of SEQ ID NO:3635, and a VL having an amino acid sequence of SEQ ID NO:3636. In one aspect, provided herein is an antibody that binds TRDV2, comprising a heavy chain having an amino acid sequence of SEQ ID NO:3637. In one aspect, provided herein is an antibody that binds TRDV2, comprising a light chain having an amino acid sequence of SEQ ID NO:3638. In one aspect, provided herein is an antibody that binds TRDV2, comprising a heavy chain having an amino acid sequence of SEQ ID NO:3637, and a light chain having an amino acid sequence of SEQ ID NO:3638. In one aspect, provided herein is an antibody that binds TRDV2, comprising a VH having an amino acid sequence having at least 95% identity to an amino acid sequence of SEQ ID NO:3635. In one aspect, provided herein is an antibody that binds TRDV2, comprising a VL having an amino acid sequence having at least 95% identity to an amino acid sequence of SEQ ID NO:3636. In one aspect, provided herein is an antibody that binds TRDV2, comprising a VH having an amino acid sequence having at least 95% identity to an amino acid sequence of SEQ ID NO:3635, and a VL having an amino acid sequence having at least 95% identity to an amino acid sequence of SEQ ID NO:3636. In one aspect, provided herein is an antibody that binds TRDV2, comprising a heavy chain having an amino acid sequence having at least 95% identity to an amino acid sequence of SEQ ID NO:3637. In one aspect, provided herein is an antibody that binds TRDV2, comprising a light chain having an amino acid sequence having at least 95% identity to an amino acid sequence of SEQ ID NO:3638. In one aspect, provided herein is an antibody that binds TRDV2, comprising a heavy chain having an amino acid sequence having at least 95% identity to an amino acid sequence of SEQ ID NO:3637, and a light chain having an amino acid sequence having at least 95% identity to an amino acid sequence of SEQ ID NO:3638.

[0215] In one aspect, provided herein is an antibody that binds TRDV2, comprising: (i) a VH comprising a VH CDR1, a VH CDR2, and a VH CDR3 having an amino acid sequence of SEQ ID NOs:3639, 3640, and 3641, respectively, and (ii) a VL comprising a VL CDR1, VL CDR2, and VL CDR3 having an amino acid sequence of SEQ ID NOs:3642, 3643, and 3644, respectively. In one aspect, provided herein is an antibody that binds TRDV2, comprising: (i) a VH comprising a VH CDR1, a VH CDR2, and a VH CDR3 having an amino acid sequence of SEQ ID NOs:3645, 3646, and 3647, respectively, and (ii) a VL comprising a VL CDR1, VL CDR2, and VL CDR3 having an amino acid sequence of SEQ ID NOs:3648, 3649, and 3650, respectively. In one aspect, provided herein is an antibody that binds TRDV2, comprising: (i) a VH comprising a VH CDR1, a VH CDR2, and a VH CDR3 having an amino acid sequence of SEQ ID NOs:3651, 3652, and 3653, respectively, and (ii) a VL comprising a VL CDR1, VL CDR2, and VL CDR3 having an amino acid sequence of SEQ ID NOs:3654, 3655, and 3656, respectively. In one aspect, provided herein is an antibody that binds TRDV2, comprising: (i) a VH comprising a VH CDR1, a VH CDR2, and a VH CDR3 having an amino acid sequence of SEQ ID NOs:3657, 3658, and 3659, respectively, and (ii) a VL comprising a VL CDR1, VL CDR2, and VL CDR3 having an amino acid sequence of SEQ ID NOs:3660, 3661, and 3662, respectively. In one aspect, provided herein is an antibody that binds TRDV2, comprising: (i) a VH comprising a VH CDR1, a VH CDR2, and a VH CDR3 having an amino acid sequence of SEQ ID NOs:3663, 3664, and 3665, respectively, and (ii) a VL comprising a VL CDR1, VL CDR2, and VL CDR3 having an amino acid sequence of SEQ ID NOs:3666, 3667, and 3668, respectively. In one aspect, provided herein is an antibody that binds TRDV2, comprising: (i) a VH comprising a VH CDR1, a VH CDR2, and a VH CDR3 having an amino acid sequence of a VH CDR1, a VH CDR2, and a VH CDR3, respectively, of a VH having an amino acid sequence of SEQ ID NO:3669; and (ii) a VL comprising a VL CDR1, a VL CDR2, and a VL CDR3 having an amino acid sequence of a VL CDR1, a VL CDR2, and a VL CDR3, respectively, of SEQ ID NO:3670. In one aspect, provided herein is an antibody that binds TRDV2, comprising a VH having an amino acid sequence of SEQ ID NO:3669. In one aspect, provided herein is an antibody that binds TRDV2, comprising a VL having an amino acid sequence of SEQ ID NO:3670. In one aspect, provided herein is an antibody that binds TRDV2, comprising a VH having an amino acid sequence of SEQ ID NO:3669, and a VL having an amino acid sequence of SEQ ID NO:3670. In one aspect, provided herein is an antibody that binds TRDV2, comprising a heavy chain having an amino acid sequence of SEQ ID NO:3671. In one aspect, provided herein is an antibody that binds TRDV2, comprising a light chain having an amino acid sequence of SEQ ID NO:3672. In one aspect, provided herein is an antibody that binds TRDV2, comprising a heavy chain having an amino acid sequence of SEQ ID NO:3671, and a light chain having an amino acid sequence of SEQ ID NO:3672. In one aspect, provided herein is an antibody that binds TRDV2, comprising a VH having an amino acid sequence having at least 95% identity to an amino acid sequence of SEQ ID NO:3669. In one aspect, provided herein is an antibody that binds TRDV2, comprising a VL having an amino acid sequence having at least 95% identity to an amino acid sequence of SEQ ID NO:3670. In one aspect, provided herein is an antibody that binds TRDV2, comprising a VH having an amino acid sequence having at least 95% identity to an amino acid sequence of SEQ ID NO:3669, and a VL having an amino acid sequence having at least 95% identity to an amino acid sequence of SEQ ID NO:3670. In one aspect, provided herein is an antibody that binds TRDV2, comprising a heavy chain having an amino acid sequence having at least 95% identity to an amino acid sequence of SEQ ID NO:3671. In one aspect, provided herein is an antibody that binds TRDV2, comprising a light chain having an amino acid sequence having at least 95% identity to an amino acid sequence of SEQ ID NO:3672. In one aspect, provided herein is an antibody that binds TRDV2, comprising a heavy chain having an amino acid sequence having at least 95% identity to an amino acid sequence of SEQ ID NO:3671, and a light chain having an amino acid sequence having at least 95% identity to an amino acid sequence of SEQ ID NO:3672.

[0216] In one aspect, provided herein is an antibody that binds TRDV2, comprising: (i) a VH comprising a VH CDR1, a VH CDR2, and a VH CDR3 having an amino acid sequence of SEQ ID NOs:3673, 3674, and 3675, respectively, and (ii) a VL comprising a VL CDR1, VL CDR2, and VL CDR3 having an amino acid sequence of SEQ ID NOs:3676, 3677, and 3678, respectively. In one aspect, provided herein is an antibody that binds TRDV2, comprising: (i) a VH comprising a VH CDR1, a VH CDR2, and a VH CDR3 having an amino acid sequence of SEQ ID NOs:3679, 3680, and 3681, respectively, and (ii) a VL comprising a VL CDR1, VL CDR2, and VL CDR3 having an amino acid sequence of SEQ ID NOs:3682, 3683, and 3684, respectively. In one aspect, provided herein is an antibody that binds TRDV2, comprising: (i) a VH comprising a VH CDR1, a VH CDR2, and a VH CDR3 having an amino acid sequence of SEQ ID NOs:3685, 3686, and 3687, respectively, and (ii) a VL comprising a VL CDR1, VL CDR2, and VL CDR3 having an amino acid sequence of SEQ ID NOs:3688, 3689, and 3690, respectively. In one aspect, provided herein is an antibody that binds TRDV2, comprising: (i) a VH comprising a VH CDR1, a VH CDR2, and a VH CDR3 having an amino acid sequence of SEQ ID NOs:3691, 3692, and 3693, respectively, and (ii) a VL comprising a VL CDR1, VL CDR2, and VL CDR3 having an amino acid sequence of SEQ ID NOs:3694, 3695, and 3696, respectively. In one aspect, provided herein is an antibody that binds TRDV2, comprising: (i) a VH comprising a VH CDR1, a VH CDR2, and a VH CDR3 having an amino acid sequence of SEQ ID NOs:3697, 3698, and 3699, respectively, and (ii) a VL comprising a VL CDR1, VL CDR2, and VL CDR3 having an amino acid sequence of SEQ ID NOs:3700, 3701, and 3702, respectively. In one aspect, provided herein is an antibody that binds TRDV2, comprising: (i) a VH comprising a VH CDR1, a VH CDR2, and a VH CDR3 having an amino acid sequence of a VH CDR1, a VH CDR2, and a VH CDR3, respectively, of a VH having an amino acid sequence of SEQ ID NO:3703; and (ii) a VL comprising a VL CDR1, a VL CDR2, and a VL CDR3 having an amino acid sequence of a VL CDR1, a VL CDR2, and a VL CDR3, respectively, of SEQ ID NO:3704. In one aspect, provided herein is an antibody that binds TRDV2, comprising a VH having an amino acid sequence of SEQ ID NO:3703. In one aspect, provided herein is an antibody that binds TRDV2, comprising a VL having an amino acid sequence of SEQ ID NO:3704. In one aspect, provided herein is an antibody that binds TRDV2, comprising a VH having an amino acid sequence of SEQ ID NO:3703, and a VL having an amino acid sequence of SEQ ID NO:3704. In one aspect, provided herein is an antibody that binds TRDV2, comprising a heavy chain having an amino acid sequence of SEQ ID NO:3705. In one aspect, provided herein is an antibody that binds TRDV2, comprising a light chain having an amino acid sequence of SEQ ID NO:3706. In one aspect, provided herein is an antibody that binds TRDV2, comprising a heavy chain having an amino acid sequence of SEQ ID NO:3705, and a light chain having an amino acid sequence of SEQ ID NO:3706. In one aspect, provided herein is an antibody that binds TRDV2, comprising a VH having an amino acid sequence having at least 95% identity to an amino acid sequence of SEQ ID NO:3703. In one aspect, provided herein is an antibody that binds TRDV2, comprising a VL having an amino acid sequence having at least 95% identity to an amino acid sequence of SEQ ID NO:3704. In one aspect, provided herein is an antibody that binds TRDV2, comprising a VH having an amino acid sequence having at least 95% identity to an amino acid sequence of SEQ ID NO:3703, and a VL having an amino acid sequence having at least 95% identity to an amino acid sequence of SEQ ID NO:3704. In one aspect, provided herein is an antibody that binds TRDV2, comprising a heavy chain having an amino acid sequence having at least 95% identity to an amino acid sequence of SEQ ID NO:3705. In one aspect, provided herein is an antibody that binds TRDV2, comprising a light chain having an amino acid sequence having at least 95% identity to an amino acid sequence of SEQ ID NO:3706. In one aspect, provided herein is an antibody that binds TRDV2, comprising a heavy chain having an amino acid sequence having at least 95% identity to an amino acid sequence of SEQ ID NO:3705, and a light chain having an amino acid sequence having at least 95% identity to an amino acid sequence of SEQ ID NO:3706.

[0217] In one aspect, provided herein is an antibody that binds TRDV2, comprising: (i) a VH comprising a VH CDR1, a VH CDR2, and a VH CDR3 having an amino acid sequence of SEQ ID NOs:3707, 3708, and 3709, respectively, and (ii) a VL comprising a VL CDR1, VL CDR2, and VL CDR3 having an amino acid sequence of SEQ ID NOs:3710, 3711, and 3712, respectively. In one aspect, provided herein is an antibody that binds TRDV2, comprising: (i) a VH comprising a VH CDR1, a VH CDR2, and a VH CDR3 having an amino acid sequence of SEQ ID NOs:3713, 3714, and 3715, respectively, and (ii) a VL comprising a VL CDR1, VL CDR2, and VL CDR3 having an amino acid sequence of SEQ ID NOs:3716, 3717, and 3718, respectively. In one aspect, provided herein is an antibody that binds TRDV2, comprising: (i) a VH comprising a VH CDR1, a VH CDR2, and a VH CDR3 having an amino acid sequence of SEQ ID NOs:3719, 3720, and 3721, respectively, and (ii) a VL comprising a VL CDR1, VL CDR2, and VL CDR3 having an amino acid sequence of SEQ ID NOs:3722, 3723, and 3724, respectively. In one aspect, provided herein is an antibody that binds TRDV2, comprising: (i) a VH comprising a VH CDR1, a VH CDR2, and a VH CDR3 having an amino acid sequence of SEQ ID NOs:3725, 3726, and 3727, respectively, and (ii) a VL comprising a VL CDR1, VL CDR2, and VL CDR3 having an amino acid sequence of SEQ ID NOs:3728, 3729, and 3730, respectively. In one aspect, provided herein is an antibody that binds TRDV2, comprising: (i) a VH comprising a VH CDR1, a VH CDR2, and a VH CDR3 having an amino acid sequence of SEQ ID NOs:3731, 3732, and 3733, respectively, and (ii) a VL comprising a VL CDR1, VL CDR2, and VL CDR3 having an amino acid sequence of SEQ ID NOs:3734, 3735, and 3736, respectively. In one aspect, provided herein is an antibody that binds TRDV2, comprising: (i) a VH comprising a VH CDR1, a VH CDR2, and a VH CDR3 having an amino acid sequence of a VH CDR1, a VH CDR2, and a VH CDR3, respectively, of a VH having an amino acid sequence of SEQ ID NO:3737; and (ii) a VL comprising a VL CDR1, a VL CDR2, and a VL CDR3 having an amino acid sequence of a VL CDR1, a VL CDR2, and a VL CDR3, respectively, of SEQ ID NO:3738. In one aspect, provided herein is an antibody that binds TRDV2, comprising a VH having an amino acid sequence of SEQ ID NO:3737. In one aspect, provided herein is an antibody that binds TRDV2, comprising a VL having an amino acid sequence of SEQ ID NO:3738. In one aspect, provided herein is an antibody that binds TRDV2, comprising a VH having an amino acid sequence of SEQ ID NO:3737, and a VL having an amino acid sequence of SEQ ID NO:3738. In one aspect, provided herein is an antibody that binds TRDV2, comprising a heavy chain having an amino acid sequence of SEQ ID NO:3739. In one aspect, provided herein is an antibody that binds TRDV2, comprising a light chain having an amino acid sequence of SEQ ID NO:3740. In one aspect, provided herein is an antibody that binds TRDV2, comprising a heavy chain having an amino acid sequence of SEQ ID NO:3739, and a light chain having an amino acid sequence of SEQ ID NO:3740. In one aspect, provided herein is an antibody that binds TRDV2, comprising a VH having an amino acid sequence having at least 95% identity to an amino acid sequence of SEQ ID NO:3737. In one aspect, provided herein is an antibody that binds TRDV2, comprising a VL having an amino acid sequence having at least 95% identity to an amino acid sequence of SEQ ID NO:3738. In one aspect, provided herein is an antibody that binds TRDV2, comprising a VH having an amino acid sequence having at least 95% identity to an amino acid sequence of SEQ ID NO:3737, and a VL having an amino acid sequence having at least 95% identity to an amino acid sequence of SEQ ID NO:3738. In one aspect, provided herein is an antibody that binds TRDV2, comprising a heavy chain having an amino acid sequence having at least 95% identity to an amino acid sequence of SEQ ID NO:3739. In one aspect, provided herein is an antibody that binds TRDV2, comprising a light chain having an amino acid sequence having at least 95% identity to an amino acid sequence of SEQ ID NO:3740. In one aspect, provided herein is an antibody that binds TRDV2, comprising a heavy chain having an amino acid sequence having at least 95% identity to an amino acid sequence of SEQ ID NO:3739, and a light chain having an amino acid sequence having at least 95% identity to an amino acid sequence of SEQ ID NO:3740.

[0218] In one aspect, provided herein is an antibody that binds TRDV2, comprising: (i) a VH comprising a VH CDR1, a VH CDR2, and a VH CDR3 having an amino acid sequence of SEQ ID NOs:3741, 3742, and 3743, respectively, and (ii) a VL comprising a VL CDR1, VL CDR2, and VL CDR3 having an amino acid sequence of SEQ ID NOs:3744, 3745, and 3746, respectively. In one aspect, provided herein is an antibody that binds TRDV2, comprising: (i) a VH comprising a VH CDR1, a VH CDR2, and a VH CDR3 having an amino acid sequence of SEQ ID NOs:3747, 3748, and 3749, respectively, and (ii) a VL comprising a VL CDR1, VL CDR2, and VL CDR3 having an amino acid sequence of SEQ ID NOs:3750, 3751, and 3752, respectively. In one aspect, provided herein is an antibody that binds TRDV2, comprising: (i) a VH comprising a VH CDR1, a VH CDR2, and a VH CDR3 having an amino acid sequence of SEQ ID NOs:3753, 3754, and 3755, respectively, and (ii) a VL comprising a VL CDR1, VL CDR2, and VL CDR3 having an amino acid sequence of SEQ ID NOs:3756, 3757, and 3758, respectively. In one aspect, provided herein is an antibody that binds TRDV2, comprising: (i) a VH comprising a VH CDR1, a VH CDR2, and a VH CDR3 having an amino acid sequence of SEQ ID NOs:3759, 3760, and 3761, respectively, and (ii) a VL comprising a VL CDR1, VL CDR2, and VL CDR3 having an amino acid sequence of SEQ ID NOs:3762, 3763, and 3764, respectively. In one aspect, provided herein is an antibody that binds TRDV2, comprising: (i) a VH comprising a VH CDR1, a VH CDR2, and a VH CDR3 having an amino acid sequence of SEQ ID NOs:3765, 3766, and 3767, respectively, and (ii) a VL comprising a VL CDR1, VL CDR2, and VL CDR3 having an amino acid sequence of SEQ ID NOs:3768, 3769, and 3770, respectively. In one aspect, provided herein is an antibody that binds TRDV2, comprising: (i) a VH comprising a VH CDR1, a VH CDR2, and a VH CDR3 having an amino acid sequence of a VH CDR1, a VH CDR2, and a VH CDR3, respectively, of a VH having an amino acid sequence of SEQ ID NO:3771; and (ii) a VL comprising a VL CDR1, a VL CDR2, and a VL CDR3 having an amino acid sequence of a VL CDR1, a VL CDR2, and a VL CDR3, respectively, of SEQ ID NO:3772. In one aspect, provided herein is an antibody that binds TRDV2, comprising a VH having an amino acid sequence of SEQ ID NO:3771. In one aspect, provided herein is an antibody that binds TRDV2, comprising a VL having an amino acid sequence of SEQ ID NO:3772. In one aspect, provided herein is an antibody that binds TRDV2, comprising a VH having an amino acid sequence of SEQ ID NO:3771, and a VL having an amino acid sequence of SEQ ID NO:3772. In one aspect, provided herein is an antibody that binds TRDV2, comprising a heavy chain having an amino acid sequence of SEQ ID NO:3773. In one aspect, provided herein is an antibody that binds TRDV2, comprising a light chain having an amino acid sequence of SEQ ID NO:3774. In one aspect, provided herein is an antibody that binds TRDV2, comprising a heavy chain having an amino acid sequence of SEQ ID NO:3773, and a light chain having an amino acid sequence of SEQ ID NO:3774. In one aspect, provided herein is an antibody that binds TRDV2, comprising a VH having an amino acid sequence having at least 95% identity to an amino acid sequence of SEQ ID NO:3771. In one aspect, provided herein is an antibody that binds TRDV2, comprising a VL having an amino acid sequence having at least 95% identity to an amino acid sequence of SEQ ID NO:3772. In one aspect, provided herein is an antibody that binds TRDV2, comprising a VH having an amino acid sequence having at least 95% identity to an amino acid sequence of SEQ ID NO:3771, and a VL having an amino acid sequence having at least 95% identity to an amino acid sequence of SEQ ID NO:3772. In one aspect, provided herein is an antibody that binds TRDV2, comprising a heavy chain having an amino acid sequence having at least 95% identity to an amino acid sequence of SEQ ID NO:3773. In one aspect, provided herein is an antibody that binds TRDV2, comprising a light chain having an amino acid sequence having at least 95% identity to an amino acid sequence of SEQ ID NO:3774. In one aspect, provided herein is an antibody that binds TRDV2, comprising a heavy chain having an amino acid sequence having at least 95% identity to an amino acid sequence of SEQ ID NO:3773, and a light chain having an amino acid sequence having at least 95% identity to an amino acid sequence of SEQ ID NO:3774.

[0219] In one aspect, provided herein is an antibody that binds TRDV2, comprising: (i) a VH comprising a VH CDR1, a VH CDR2, and a VH CDR3 having an amino acid sequence of SEQ ID NOs:3775, 3776, and 3777, respectively, and (ii) a VL comprising a VL CDR1, VL CDR2, and VL CDR3 having an amino acid sequence of SEQ ID NOs:3778, 3779, and 3780, respectively. In one aspect, provided herein is an antibody that binds TRDV2, comprising: (i) a VH comprising a VH CDR1, a VH CDR2, and a VH CDR3 having an amino acid sequence of SEQ ID NOs:3781, 3782, and 3783, respectively, and (ii) a VL comprising a VL CDR1, VL CDR2, and VL CDR3 having an amino acid sequence of SEQ ID NOs:3784, 3785, and 3786, respectively. In one aspect, provided herein is an antibody that binds TRDV2, comprising: (i) a VH comprising a VH CDR1, a VH CDR2, and a VH CDR3 having an amino acid sequence of SEQ ID NOs:3787, 3788, and 3789, respectively, and (ii) a VL comprising a VL CDR1, VL CDR2, and VL CDR3 having an amino acid sequence of SEQ ID NOs:3790, 3791, and 3792, respectively. In one aspect, provided herein is an antibody that binds TRDV2, comprising: (i) a VH comprising a VH CDR1, a VH CDR2, and a VH CDR3 having an amino acid sequence of SEQ ID NOs:3793, 3794, and 3795, respectively, and (ii) a VL comprising a VL CDR1, VL CDR2, and VL CDR3 having an amino acid sequence of SEQ ID NOs:3796, 3797, and 3798, respectively. In one aspect, provided herein is an antibody that binds TRDV2, comprising: (i) a VH comprising a VH CDR1, a VH CDR2, and a VH CDR3 having an amino acid sequence of SEQ ID NOs:3799, 3800, and 3801, respectively, and (ii) a VL comprising a VL CDR1, VL CDR2, and VL CDR3 having an amino acid sequence of SEQ ID NOs:3802, 3803, and 3804, respectively. In one aspect, provided herein is an antibody that binds TRDV2, comprising: (i) a VH comprising a VH CDR1, a VH CDR2, and a VH CDR3 having an amino acid sequence of a VH CDR1, a VH CDR2, and a VH CDR3, respectively, of a VH having an amino acid sequence of SEQ ID NO:3805; and (ii) a VL comprising a VL CDR1, a VL CDR2, and a VL CDR3 having an amino acid sequence of a VL CDR1, a VL CDR2, and a VL CDR3, respectively, of SEQ ID NO:3806. In one aspect, provided herein is an antibody that binds TRDV2, comprising a VH having an amino acid sequence of SEQ ID NO:3805. In one aspect, provided herein is an antibody that binds TRDV2, comprising a VL having an amino acid sequence of SEQ ID NO:3806. In one aspect, provided herein is an antibody that binds TRDV2, comprising a VH having an amino acid sequence of SEQ ID NO:3805, and a VL having an amino acid sequence of SEQ ID NO:3806. In one aspect, provided herein is an antibody that binds TRDV2, comprising a heavy chain having an amino acid sequence of SEQ ID NO:3807. In one aspect, provided herein is an antibody that binds TRDV2, comprising a light chain having an amino acid sequence of SEQ ID NO:3808. In one aspect, provided herein is an antibody that binds TRDV2, comprising a heavy chain having an amino acid sequence of SEQ ID NO:3807, and a light chain having an amino acid sequence of SEQ ID NO:3808. In one aspect, provided herein is an antibody that binds TRDV2, comprising a VH having an amino acid sequence having at least 95% identity to an amino acid sequence of SEQ ID NO:3805. In one aspect, provided herein is an antibody that binds TRDV2, comprising a VL having an amino acid sequence having at least 95% identity to an amino acid sequence of SEQ ID NO:3806. In one aspect, provided herein is an antibody that binds TRDV2, comprising a VH having an amino acid sequence having at least 95% identity to an amino acid sequence of SEQ ID NO:3805, and a VL having an amino acid sequence having at least 95% identity to an amino acid sequence of SEQ ID NO:3806. In one aspect, provided herein is an antibody that binds TRDV2, comprising a heavy chain having an amino acid sequence having at least 95% identity to an amino acid sequence of SEQ ID NO:3807. In one aspect, provided herein is an antibody that binds TRDV2, comprising a light chain having an amino acid sequence having at least 95% identity to an amino acid sequence of SEQ ID NO:3808. In one aspect, provided herein is an antibody that binds TRDV2, comprising a heavy chain having an amino acid sequence having at least 95% identity to an amino acid sequence of SEQ ID NO:3807, and a light chain having an amino acid sequence having at least 95% identity to an amino acid sequence of SEQ ID NO:3808.

[0220] In one aspect, provided herein is an antibody that binds TRDV2, comprising: (i) a VH comprising a VH CDR1, a VH CDR2, and a VH CDR3 having an amino acid sequence of SEQ ID NOs:3809, 3810, and 3811, respectively, and (ii) a VL comprising a VL CDR1, VL CDR2, and VL CDR3 having an amino acid sequence of SEQ ID NOs:3812, 3813, and 3814, respectively. In one aspect, provided herein is an antibody that binds TRDV2, comprising: (i) a VH comprising a VH CDR1, a VH CDR2, and a VH CDR3 having an amino acid sequence of SEQ ID NOs:3815, 3816, and 3817, respectively, and (ii) a VL comprising a VL CDR1, VL CDR2, and VL CDR3 having an amino acid sequence of SEQ ID NOs:3818, 3819, and 3820, respectively. In one aspect, provided herein is an antibody that binds TRDV2, comprising: (i) a VH comprising a VH CDR1, a VH CDR2, and a VH CDR3 having an amino acid sequence of SEQ ID NOs:3821, 3822, and 3823, respectively, and (ii) a VL comprising a VL CDR1, VL CDR2, and VL CDR3 having an amino acid sequence of SEQ ID NOs:3824, 3825, and 3826, respectively. In one aspect, provided herein is an antibody that binds TRDV2, comprising: (i) a VH comprising a VH CDR1, a VH CDR2, and a VH CDR3 having an amino acid sequence of SEQ ID NOs:3827, 3828, and 3829, respectively, and (ii) a VL comprising a VL CDR1, VL CDR2, and VL CDR3 having an amino acid sequence of SEQ ID NOs:3830, 3831, and 3832, respectively. In one aspect, provided herein is an antibody that binds TRDV2, comprising: (i) a VH comprising a VH CDR1, a VH CDR2, and a VH CDR3 having an amino acid sequence of SEQ ID NOs:3833, 3834, and 3835, respectively, and (ii) a VL comprising a VL CDR1, VL CDR2, and VL CDR3 having an amino acid sequence of SEQ ID NOs:3836, 3837, and 3838, respectively. In one aspect, provided herein is an antibody that binds TRDV2, comprising: (i) a VH comprising a VH CDR1, a VH CDR2, and a VH CDR3 having an amino acid sequence of a VH CDR1, a VH CDR2, and a VH CDR3, respectively, of a VH having an amino acid sequence of SEQ ID NO:3839; and (ii) a VL comprising a VL CDR1, a VL CDR2, and a VL CDR3 having an amino acid sequence of a VL CDR1, a VL CDR2, and a VL CDR3, respectively, of SEQ ID NO:3840. In one aspect, provided herein is an antibody that binds TRDV2, comprising a VH having an amino acid sequence of SEQ ID NO:3839. In one aspect, provided herein is an antibody that binds TRDV2, comprising a VL having an amino acid sequence of SEQ ID NO:3840. In one aspect, provided herein is an antibody that binds TRDV2, comprising a VH having an amino acid sequence of SEQ ID NO:3839, and a VL having an amino acid sequence of SEQ ID NO:3840. In one aspect, provided herein is an antibody that binds TRDV2, comprising a heavy chain having an amino acid sequence of SEQ ID NO:3841. In one aspect, provided herein is an antibody that binds TRDV2, comprising a light chain having an amino acid sequence of SEQ ID NO:3842. In one aspect, provided herein is an antibody that binds TRDV2, comprising a heavy chain having an amino acid sequence of SEQ ID NO:3841, and a light chain having an amino acid sequence of SEQ ID NO:3842. In one aspect, provided herein is an antibody that binds TRDV2, comprising a VH having an amino acid sequence having at least 95% identity to an amino acid sequence of SEQ ID NO:3839. In one aspect, provided herein is an antibody that binds TRDV2, comprising a VL having an amino acid sequence having at least 95% identity to an amino acid sequence of SEQ ID NO:3840. In one aspect, provided herein is an antibody that binds TRDV2, comprising a VH having an amino acid sequence having at least 95% identity to an amino acid sequence of SEQ ID NO:3839, and a VL having an amino acid sequence having at least 95% identity to an amino acid sequence of SEQ ID NO:3840. In one aspect, provided herein is an antibody that binds TRDV2, comprising a heavy chain having an amino acid sequence having at least 95% identity to an amino acid sequence of SEQ ID NO:3841. In one aspect, provided herein is an antibody that binds TRDV2, comprising a light chain having an amino acid sequence having at least 95% identity to an amino acid sequence of SEQ ID NO:3842. In one aspect, provided herein is an antibody that binds TRDV2, comprising a heavy chain having an amino acid sequence having at least 95% identity to an amino acid sequence of SEQ ID NO:3841, and a light chain having an amino acid sequence having at least 95% identity to an amino acid sequence of SEQ ID NO:3842.

[0221] In one aspect, provided herein is an antibody that binds TRDV2, comprising: (i) a VH comprising a VH CDR1, a VH CDR2, and a VH CDR3 having an amino acid sequence of SEQ ID NOs:3843, 3844, and 3845, respectively, and (ii) a VL comprising a VL CDR1, VL CDR2, and VL CDR3 having an amino acid sequence of SEQ ID NOs:3846, 3847, and 3848, respectively. In one aspect, provided herein is an antibody that binds TRDV2, comprising: (i) a VH comprising a VH CDR1, a VH CDR2, and a VH CDR3 having an amino acid sequence of SEQ ID NOs:3849, 3850, and 3851, respectively, and (ii) a VL comprising a VL CDR1, VL CDR2, and VL CDR3 having an amino acid sequence of SEQ ID NOs:3852, 3853, and 3854, respectively. In one aspect, provided herein is an antibody that binds TRDV2, comprising: (i) a VH comprising a VH CDR1, a VH CDR2, and a VH CDR3 having an amino acid sequence of SEQ ID NOs:3855, 3856, and 3857, respectively, and (ii) a VL comprising a VL CDR1, VL CDR2, and VL CDR3 having an amino acid sequence of SEQ ID NOs:3858, 3859, and 3860, respectively. In one aspect, provided herein is an antibody that binds TRDV2, comprising: (i) a VH comprising a VH CDR1, a VH CDR2, and a VH CDR3 having an amino acid sequence of SEQ ID NOs:3861, 3862, and 3863, respectively, and (ii) a VL comprising a VL CDR1, VL CDR2, and VL CDR3 having an amino acid sequence of SEQ ID NOs:3864, 3865, and 3866, respectively. In one aspect, provided herein is an antibody that binds TRDV2, comprising: (i) a VH comprising a VH CDR1, a VH CDR2, and a VH CDR3 having an amino acid sequence of SEQ ID NOs:3867, 3868, and 3869, respectively, and (ii) a VL comprising a VL CDR1, VL CDR2, and VL CDR3 having an amino acid sequence of SEQ ID NOs:3870, 3871, and 3872, respectively. In one aspect, provided herein is an antibody that binds TRDV2, comprising: (i) a VH comprising a VH CDR1, a VH CDR2, and a VH CDR3 having an amino acid sequence of a VH CDR1, a VH CDR2, and a VH CDR3, respectively, of a VH having an amino acid sequence of SEQ ID NO:3873; and (ii) a VL comprising a VL CDR1, a VL CDR2, and a VL CDR3 having an amino acid sequence of a VL CDR1, a VL CDR2, and a VL CDR3, respectively, of SEQ ID NO:3874. In one aspect, provided herein is an antibody that binds TRDV2, comprising a VH having an amino acid sequence of SEQ ID NO:3873. In one aspect, provided herein is an antibody that binds TRDV2, comprising a VL having an amino acid sequence of SEQ ID NO:3874. In one aspect, provided herein is an antibody that binds TRDV2, comprising a VH having an amino acid sequence of SEQ ID NO:3873, and a VL having an amino acid sequence of SEQ ID NO:3874. In one aspect, provided herein is an antibody that binds TRDV2, comprising a heavy chain having an amino acid sequence of SEQ ID NO:3875. In one aspect, provided herein is an antibody that binds TRDV2, comprising a light chain having an amino acid sequence of SEQ ID NO:3876. In one aspect, provided herein is an antibody that binds TRDV2, comprising a heavy chain having an amino acid sequence of SEQ ID NO:3875, and a light chain having an amino acid sequence of SEQ ID NO:3876. In one aspect, provided herein is an antibody that binds TRDV2, comprising a VH having an amino acid sequence having at least 95% identity to an amino acid sequence of SEQ ID NO:3873. In one aspect, provided herein is an antibody that binds TRDV2, comprising a VL having an amino acid sequence having at least 95% identity to an amino acid sequence of SEQ ID NO:3874. In one aspect, provided herein is an antibody that binds TRDV2, comprising a VH having an amino acid sequence having at least 95% identity to an amino acid sequence of SEQ ID NO:3873, and a VL having an amino acid sequence having at least 95% identity to an amino acid sequence of SEQ ID NO:3874. In one aspect, provided herein is an antibody that binds TRDV2, comprising a heavy chain having an amino acid sequence having at least 95% identity to an amino acid sequence of SEQ ID NO:3875. In one aspect, provided herein is an antibody that binds TRDV2, comprising a light chain having an amino acid sequence having at least 95% identity to an amino acid sequence of SEQ ID NO:3876. In one aspect, provided herein is an antibody that binds TRDV2, comprising a heavy chain having an amino acid sequence having at least 95% identity to an amino acid sequence of SEQ ID NO:3875, and a light chain having an amino acid sequence having at least 95% identity to an amino acid sequence of SEQ ID NO:3876.

[0222] In one aspect, provided herein is an antibody that binds TRDV2, comprising: (i) a VH comprising a VH CDR1, a VH CDR2, and a VH CDR3 having an amino acid sequence of SEQ ID NOs:3877, 3878, and 3879, respectively, and (ii) a VL comprising a VL CDR1, VL CDR2, and VL CDR3 having an amino acid sequence of SEQ ID NOs:3880, 3881, and 3882, respectively. In one aspect, provided herein is an antibody that binds TRDV2, comprising: (i) a VH comprising a VH CDR1, a VH CDR2, and a VH CDR3 having an amino acid sequence of SEQ ID NOs:3883, 3884, and 3885, respectively, and (ii) a VL comprising a VL CDR1, VL CDR2, and VL CDR3 having an amino acid sequence of SEQ ID NOs:3886, 3887, and 3888, respectively. In one aspect, provided herein is an antibody that binds TRDV2, comprising: (i) a VH comprising a VH CDR1, a VH CDR2, and a VH CDR3 having an amino acid sequence of SEQ ID NOs:3889, 3890, and 3891, respectively, and (ii) a VL comprising a VL CDR1, VL CDR2, and VL CDR3 having an amino acid sequence of SEQ ID NOs:3892, 3893, and 3894, respectively. In one aspect, provided herein is an antibody that binds TRDV2, comprising: (i) a VH comprising a VH CDR1, a VH CDR2, and a VH CDR3 having an amino acid sequence of SEQ ID NOs:3895, 3896, and 3897, respectively, and (ii) a VL comprising a VL CDR1, VL CDR2, and VL CDR3 having an amino acid sequence of SEQ ID NOs:3898, 3899, and 3900, respectively. In one aspect, provided herein is an antibody that binds TRDV2, comprising: (i) a VH comprising a VH CDR1, a VH CDR2, and a VH CDR3 having an amino acid sequence of SEQ ID NOs:3901, 3902, and 3903, respectively, and (ii) a VL comprising a VL CDR1, VL CDR2, and VL CDR3 having an amino acid sequence of SEQ ID NOs:3904, 3905, and 3906, respectively. In one aspect, provided herein is an antibody that binds TRDV2, comprising: (i) a VH comprising a VH CDR1, a VH CDR2, and a VH CDR3 having an amino acid sequence of a VH CDR1, a VH CDR2, and a VH CDR3, respectively, of a VH having an amino acid sequence of SEQ ID NO:3907; and (ii) a VL comprising a VL CDR1, a VL CDR2, and a VL CDR3 having an amino acid sequence of a VL CDR1, a VL CDR2, and a VL CDR3, respectively, of SEQ ID NO:3908. In one aspect, provided herein is an antibody that binds TRDV2, comprising a VH having an amino acid sequence of SEQ ID NO:3907. In one aspect, provided herein is an antibody that binds TRDV2, comprising a VL having an amino acid sequence of SEQ ID NO:3908. In one aspect, provided herein is an antibody that binds TRDV2, comprising a VH having an amino acid sequence of SEQ ID NO:3907, and a VL having an amino acid sequence of SEQ ID NO:3908. In one aspect, provided herein is an antibody that binds TRDV2, comprising a heavy chain having an amino acid sequence of SEQ ID NO:3909. In one aspect, provided herein is an antibody that binds TRDV2, comprising a light chain having an amino acid sequence of SEQ ID NO:3910. In one aspect, provided herein is an antibody that binds TRDV2, comprising a heavy chain having an amino acid sequence of SEQ ID NO:3909, and a light chain having an amino acid sequence of SEQ ID NO:3910. In one aspect, provided herein is an antibody that binds TRDV2, comprising a VH having an amino acid sequence having at least 95% identity to an amino acid sequence of SEQ ID NO:3907. In one aspect, provided herein is an antibody that binds TRDV2, comprising a VL having an amino acid sequence having at least 95% identity to an amino acid sequence of SEQ ID NO:3908. In one aspect, provided herein is an antibody that binds TRDV2, comprising a VH having an amino acid sequence having at least 95% identity to an amino acid sequence of SEQ ID NO:3907, and a VL having an amino acid sequence having at least 95% identity to an amino acid sequence of SEQ ID NO:3908. In one aspect, provided herein is an antibody that binds TRDV2, comprising a heavy chain having an amino acid sequence having at least 95% identity to an amino acid sequence of SEQ ID NO:3909. In one aspect, provided herein is an antibody that binds TRDV2, comprising a light chain having an amino acid sequence having at least 95% identity to an amino acid sequence of SEQ ID NO:3910. In one aspect, provided herein is an antibody that binds TRDV2, comprising a heavy chain having an amino acid sequence having at least 95% identity to an amino acid sequence of SEQ ID NO:3909, and a light chain having an amino acid sequence having at least 95% identity to an amino acid sequence of SEQ ID NO:3910.

[0223] In one aspect, provided herein is an antibody that binds TRDV2, comprising: (i) a VH comprising a VH CDR1, a VH CDR2, and a VH CDR3 having an amino acid sequence of SEQ ID NOs:3911, 3912, and 3913, respectively, and (ii) a VL comprising a VL CDR1, VL CDR2, and VL CDR3 having an amino acid sequence of SEQ ID NOs:3914, 3915, and 3916, respectively. In one aspect, provided herein is an antibody that binds TRDV2, comprising: (i) a VH comprising a VH CDR1, a VH CDR2, and a VH CDR3 having an amino acid sequence of SEQ ID NOs:3917, 3918, and 3919, respectively, and (ii) a VL comprising a VL CDR1, VL CDR2, and VL CDR3 having an amino acid sequence of SEQ ID NOs:3920, 3921, and 3922, respectively. In one aspect, provided herein is an antibody that binds TRDV2, comprising: (i) a VH comprising a VH CDR1, a VH CDR2, and a VH CDR3 having an amino acid sequence of SEQ ID NOs:3923, 3924, and 3925, respectively, and (ii) a VL comprising a VL CDR1, VL CDR2, and VL CDR3 having an amino acid sequence of SEQ ID NOs:3926, 3927, and 3928, respectively. In one aspect, provided herein is an antibody that binds TRDV2, comprising: (i) a VH comprising a VH CDR1, a VH CDR2, and a VH CDR3 having an amino acid sequence of SEQ ID NOs:3929, 3930, and 3931, respectively, and (ii) a VL comprising a VL CDR1, VL CDR2, and VL CDR3 having an amino acid sequence of SEQ ID NOs:3932, 3933, and 3934, respectively. In one aspect, provided herein is an antibody that binds TRDV2, comprising: (i) a VH comprising a VH CDR1, a VH CDR2, and a VH CDR3 having an amino acid sequence of SEQ ID NOs:3935, 3936, and 3937, respectively, and (ii) a VL comprising a VL CDR1, VL CDR2, and VL CDR3 having an amino acid sequence of SEQ ID NOs:3938, 3939, and 3940, respectively. In one aspect, provided herein is an antibody that binds TRDV2, comprising: (i) a VH comprising a VH CDR1, a VH CDR2, and a VH CDR3 having an amino acid sequence of a VH CDR1, a VH CDR2, and a VH CDR3, respectively, of a VH having an amino acid sequence of SEQ ID NO:3941; and (ii) a VL comprising a VL CDR1, a VL CDR2, and a VL CDR3 having an amino acid sequence of a VL CDR1, a VL CDR2, and a VL CDR3, respectively, of SEQ ID NO:3942. In one aspect, provided herein is an antibody that binds TRDV2, comprising a VH having an amino acid sequence of SEQ ID NO:3941. In one aspect, provided herein is an antibody that binds TRDV2, comprising a VL having an amino acid sequence of SEQ ID NO:3942. In one aspect, provided herein is an antibody that binds TRDV2, comprising a VH having an amino acid sequence of SEQ ID NO:3941, and a VL having an amino acid sequence of SEQ ID NO:3942. In one aspect, provided herein is an antibody that binds TRDV2, comprising a heavy chain having an amino acid sequence of SEQ ID NO:3943. In one aspect, provided herein is an antibody that binds TRDV2, comprising a light chain having an amino acid sequence of SEQ ID NO:3944. In one aspect, provided herein is an antibody that binds TRDV2, comprising a heavy chain having an amino acid sequence of SEQ ID NO:3943, and a light chain having an amino acid sequence of SEQ ID NO:3944. In one aspect, provided herein is an antibody that binds TRDV2, comprising a VH having an amino acid sequence having at least 95% identity to an amino acid sequence of SEQ ID NO:3941. In one aspect, provided herein is an antibody that binds TRDV2, comprising a VL having an amino acid sequence having at least 95% identity to an amino acid sequence of SEQ ID NO:3942. In one aspect, provided herein is an antibody that binds TRDV2, comprising a VH having an amino acid sequence having at least 95% identity to an amino acid sequence of SEQ ID NO:3941, and a VL having an amino acid sequence having at least 95% identity to an amino acid sequence of SEQ ID NO:3942. In one aspect, provided herein is an antibody that binds TRDV2, comprising a heavy chain having an amino acid sequence having at least 95% identity to an amino acid sequence of SEQ ID NO:3943. In one aspect, provided herein is an antibody that binds TRDV2, comprising a light chain having an amino acid sequence having at least 95% identity to an amino acid sequence of SEQ ID NO:3944. In one aspect, provided herein is an antibody that binds TRDV2, comprising a heavy chain having an amino acid sequence having at least 95% identity to an amino acid sequence of SEQ ID NO:3943, and a light chain having an amino acid sequence having at least 95% identity to an amino acid sequence of SEQ ID NO:3944.

[0224] In one aspect, provided herein is an antibody that binds TRDV2, comprising: (i) a VH comprising a VH CDR1, a VH CDR2, and a VH CDR3 having an amino acid sequence of SEQ ID NOs:3945, 3946, and 3947, respectively, and (ii) a VL comprising a VL CDR1, VL CDR2, and VL CDR3 having an amino acid sequence of SEQ ID NOs:3948, 3949, and 3950, respectively. In one aspect, provided herein is an antibody that binds TRDV2, comprising: (i) a VH comprising a VH CDR1, a VH CDR2, and a VH CDR3 having an amino acid sequence of SEQ ID NOs:3951, 3952, and 3953, respectively, and (ii) a VL comprising a VL CDR1, VL CDR2, and VL CDR3 having an amino acid sequence of SEQ ID NOs:3954, 3955, and 3956, respectively. In one aspect, provided herein is an antibody that binds TRDV2, comprising: (i) a VH comprising a VH CDR1, a VH CDR2, and a VH CDR3 having an amino acid sequence of SEQ ID NOs:3957, 3958, and 3959, respectively, and (ii) a VL comprising a VL CDR1, VL CDR2, and VL CDR3 having an amino acid sequence of SEQ ID NOs:3960, 3961, and 3962, respectively. In one aspect, provided herein is an antibody that binds TRDV2, comprising: (i) a VH comprising a VH CDR1, a VH CDR2, and a VH CDR3 having an amino acid sequence of SEQ ID NOs:3963, 3964, and 3965, respectively, and (ii) a VL comprising a VL CDR1, VL CDR2, and VL CDR3 having an amino acid sequence of SEQ ID NOs:3966, 3967, and 3968, respectively. In one aspect, provided herein is an antibody that binds TRDV2, comprising: (i) a VH comprising a VH CDR1, a VH CDR2, and a VH CDR3 having an amino acid sequence of SEQ ID NOs:3969, 3970, and 3971, respectively, and (ii) a VL comprising a VL CDR1, VL CDR2, and VL CDR3 having an amino acid sequence of SEQ ID NOs:3972, 3973, and 3974, respectively. In one aspect, provided herein is an antibody that binds TRDV2, comprising: (i) a VH comprising a VH CDR1, a VH CDR2, and a VH CDR3 having an amino acid sequence of a VH CDR1, a VH CDR2, and a VH CDR3, respectively, of a VH having an amino acid sequence of SEQ ID NO:3975; and (ii) a VL comprising a VL CDR1, a VL CDR2, and a VL CDR3 having an amino acid sequence of a VL CDR1, a VL CDR2, and a VL CDR3, respectively, of SEQ ID NO:3976. In one aspect, provided herein is an antibody that binds TRDV2, comprising a VH having an amino acid sequence of SEQ ID NO:3975. In one aspect, provided herein is an antibody that binds TRDV2, comprising a VL having an amino acid sequence of SEQ ID NO:3976. In one aspect, provided herein is an antibody that binds TRDV2, comprising a VH having an amino acid sequence of SEQ ID NO:3975, and a VL having an amino acid sequence of SEQ ID NO:3976. In one aspect, provided herein is an antibody that binds TRDV2, comprising a heavy chain having an amino acid sequence of SEQ ID NO:3977. In one aspect, provided herein is an antibody that binds TRDV2, comprising a light chain having an amino acid sequence of SEQ ID NO:3978. In one aspect, provided herein is an antibody that binds TRDV2, comprising a heavy chain having an amino acid sequence of SEQ ID NO:3977, and a light chain having an amino acid sequence of SEQ ID NO:3978. In one aspect, provided herein is an antibody that binds TRDV2, comprising a VH having an amino acid sequence having at least 95% identity to an amino acid sequence of SEQ ID NO:3975. In one aspect, provided herein is an antibody that binds TRDV2, comprising a VL having an amino acid sequence having at least 95% identity to an amino acid sequence of SEQ ID NO:3976. In one aspect, provided herein is an antibody that binds TRDV2, comprising a VH having an amino acid sequence having at least 95% identity to an amino acid sequence of SEQ ID NO:3975, and a VL having an amino acid sequence having at least 95% identity to an amino acid sequence of SEQ ID NO:3976. In one aspect, provided herein is an antibody that binds TRDV2, comprising a heavy chain having an amino acid sequence having at least 95% identity to an amino acid sequence of SEQ ID NO:3977. In one aspect, provided herein is an antibody that binds TRDV2, comprising a light chain having an amino acid sequence having at least 95% identity to an amino acid sequence of SEQ ID NO:3978. In one aspect, provided herein is an antibody that binds TRDV2, comprising a heavy chain having an amino acid sequence having at least 95% identity to an amino acid sequence of SEQ ID NO:3977, and a light chain having an amino acid sequence having at least 95% identity to an amino acid sequence of SEQ ID NO:3978.

[0225] In one aspect, provided herein is an antibody that binds TRDV2, comprising: (i) a VH comprising a VH CDR1, a VH CDR2, and a VH CDR3 having an amino acid sequence of SEQ ID NOs:3979, 3980, and 3981, respectively, and (ii) a VL comprising a VL CDR1, VL CDR2, and VL CDR3 having an amino acid sequence of SEQ ID NOs:3982, 3983, and 3984, respectively. In one aspect, provided herein is an antibody that binds TRDV2, comprising: (i) a VH comprising a VH CDR1, a VH CDR2, and a VH CDR3 having an amino acid sequence of SEQ ID NOs:3985, 3986, and 3987, respectively, and (ii) a VL comprising a VL CDR1, VL CDR2, and VL CDR3 having an amino acid sequence of SEQ ID NOs:3988, 3989, and 3990, respectively. In one aspect, provided herein is an antibody that binds TRDV2, comprising: (i) a VH comprising a VH CDR1, a VH CDR2, and a VH CDR3 having an amino acid sequence of SEQ ID NOs:3991, 3992, and 3993, respectively, and (ii) a VL comprising a VL CDR1, VL CDR2, and VL CDR3 having an amino acid sequence of SEQ ID NOs:3994, 3995, and 3996, respectively. In one aspect, provided herein is an antibody that binds TRDV2, comprising: (i) a VH comprising a VH CDR1, a VH CDR2, and a VH CDR3 having an amino acid sequence of SEQ ID NOs:3997, 3998, and 3999, respectively, and (ii) a VL comprising a VL CDR1, VL CDR2, and VL CDR3 having an amino acid sequence of SEQ ID NOs:4000, 4001, and 4002, respectively. In one aspect, provided herein is an antibody that binds TRDV2, comprising: (i) a VH comprising a VH CDR1, a VH CDR2, and a VH CDR3 having an amino acid sequence of SEQ ID NOs:4003, 4004, and 4005, respectively, and (ii) a VL comprising a VL CDR1, VL CDR2, and VL CDR3 having an amino acid sequence of SEQ ID NOs:4006, 4007, and 4008, respectively. In one aspect, provided herein is an antibody that binds TRDV2, comprising: (i) a VH comprising a VH CDR1, a VH CDR2, and a VH CDR3 having an amino acid sequence of a VH CDR1, a VH CDR2, and a VH CDR3, respectively, of a VH having an amino acid sequence of SEQ ID NO:4009; and (ii) a VL comprising a VL CDR1, a VL CDR2, and a VL CDR3 having an amino acid sequence of a VL CDR1, a VL CDR2, and a VL CDR3, respectively, of SEQ ID NO:4010. In one aspect, provided herein is an antibody that binds TRDV2, comprising a VH having an amino acid sequence of SEQ ID NO:4009. In one aspect, provided herein is an antibody that binds TRDV2, comprising a VL having an amino acid sequence of SEQ ID NO:4010. In one aspect, provided herein is an antibody that binds TRDV2, comprising a VH having an amino acid sequence of SEQ ID NO:4009, and a VL having an amino acid sequence of SEQ ID NO:4010. In one aspect, provided herein is an antibody that binds TRDV2, comprising a heavy chain having an amino acid sequence of SEQ ID NO:4011. In one aspect, provided herein is an antibody that binds TRDV2, comprising a light chain having an amino acid sequence of SEQ ID NO:4012. In one aspect, provided herein is an antibody that binds TRDV2, comprising a heavy chain having an amino acid sequence of SEQ ID NO:4011, and a light chain having an amino acid sequence of SEQ ID NO:4012. In one aspect, provided herein is an antibody that binds TRDV2, comprising a VH having an amino acid sequence having at least 95% identity to an amino acid sequence of SEQ ID NO:4009. In one aspect, provided herein is an antibody that binds TRDV2, comprising a VL having an amino acid sequence having at least 95% identity to an amino acid sequence of SEQ ID NO:4010. In one aspect, provided herein is an antibody that binds TRDV2, comprising a VH having an amino acid sequence having at least 95% identity to an amino acid sequence of SEQ ID NO:4009, and a VL having an amino acid sequence having at least 95% identity to an amino acid sequence of SEQ ID NO:4010. In one aspect, provided herein is an antibody that binds TRDV2, comprising a heavy chain having an amino acid sequence having at least 95% identity to an amino acid sequence of SEQ ID NO:4011. In one aspect, provided herein is an antibody that binds TRDV2, comprising a light chain having an amino acid sequence having at least 95% identity to an amino acid sequence of SEQ ID NO:4012. In one aspect, provided herein is an antibody that binds TRDV2, comprising a heavy chain having an amino acid sequence having at least 95% identity to an amino acid sequence of SEQ ID NO:4011, and a light chain having an amino acid sequence having at least 95% identity to an amino acid sequence of SEQ ID NO:4012.

[0226] In one aspect, provided herein is an antibody that binds TRDV2, comprising: (i) a VH comprising a VH CDR1, a VH CDR2, and a VH CDR3 having an amino acid sequence of SEQ ID NOs:4013, 4014, and 4015, respectively, and (ii) a VL comprising a VL CDR1, VL CDR2, and VL CDR3 having an amino acid sequence of SEQ ID NOs:4016, 4017, and 4018, respectively. In one aspect, provided herein is an antibody that binds TRDV2, comprising: (i) a VH comprising a VH CDR1, a VH CDR2, and a VH CDR3 having an amino acid sequence of SEQ ID NOs:4019, 4020, and 4021, respectively, and (ii) a VL comprising a VL CDR1, VL CDR2, and VL CDR3 having an amino acid sequence of SEQ ID NOs:4022, 4023, and 4024, respectively. In one aspect, provided herein is an antibody that binds TRDV2, comprising: (i) a VH comprising a VH CDR1, a VH CDR2, and a VH CDR3 having an amino acid sequence of SEQ ID NOs:4025, 4026, and 4027, respectively, and (ii) a VL comprising a VL CDR1, VL CDR2, and VL CDR3 having an amino acid sequence of SEQ ID NOs:4028, 4029, and 4030, respectively. In one aspect, provided herein is an antibody that binds TRDV2, comprising: (i) a VH comprising a VH CDR1, a VH CDR2, and a VH CDR3 having an amino acid sequence of SEQ ID NOs:4031, 4032, and 4033, respectively, and (ii) a VL comprising a VL CDR1, VL CDR2, and VL CDR3 having an amino acid sequence of SEQ ID NOs:4034, 4035, and 4036, respectively. In one aspect, provided herein is an antibody that binds TRDV2, comprising: (i) a VH comprising a VH CDR1, a VH CDR2, and a VH CDR3 having an amino acid sequence of SEQ ID NOs:4037, 4038, and 4039, respectively, and (ii) a VL comprising a VL CDR1, VL CDR2, and VL CDR3 having an amino acid sequence of SEQ ID NOs:4040, 4041, and 4042, respectively. In one aspect, provided herein is an antibody that binds TRDV2, comprising: (i) a VH comprising a VH CDR1, a VH CDR2, and a VH CDR3 having an amino acid sequence of a VH CDR1, a VH CDR2, and a VH CDR3, respectively, of a VH having an amino acid sequence of SEQ ID NO:4043; and (ii) a VL comprising a VL CDR1, a VL CDR2, and a VL CDR3 having an amino acid sequence of a VL CDR1, a VL CDR2, and a VL CDR3, respectively, of SEQ ID NO:4044. In one aspect, provided herein is an antibody that binds TRDV2, comprising a VH having an amino acid sequence of SEQ ID NO:4043. In one aspect, provided herein is an antibody that binds TRDV2, comprising a VL having an amino acid sequence of SEQ ID NO:4044. In one aspect, provided herein is an antibody that binds TRDV2, comprising a VH having an amino acid sequence of SEQ ID NO:4043, and a VL having an amino acid sequence of SEQ ID NO:4044. In one aspect, provided herein is an antibody that binds TRDV2, comprising a heavy chain having an amino acid sequence of SEQ ID NO:4045. In one aspect, provided herein is an antibody that binds TRDV2, comprising a light chain having an amino acid sequence of SEQ ID NO:4046. In one aspect, provided herein is an antibody that binds TRDV2, comprising a heavy chain having an amino acid sequence of SEQ ID NO:4045, and a light chain having an amino acid sequence of SEQ ID NO:4046. In one aspect, provided herein is an antibody that binds TRDV2, comprising a VH having an amino acid sequence having at least 95% identity to an amino acid sequence of SEQ ID NO:4043. In one aspect, provided herein is an antibody that binds TRDV2, comprising a VL having an amino acid sequence having at least 95% identity to an amino acid sequence of SEQ ID NO:4044. In one aspect, provided herein is an antibody that binds TRDV2, comprising a VH having an amino acid sequence having at least 95% identity to an amino acid sequence of SEQ ID NO:4043, and a VL having an amino acid sequence having at least 95% identity to an amino acid sequence of SEQ ID NO:4044. In one aspect, provided herein is an antibody that binds TRDV2, comprising a heavy chain having an amino acid sequence having at least 95% identity to an amino acid sequence of SEQ ID NO:4045. In one aspect, provided herein is an antibody that binds TRDV2, comprising a light chain having an amino acid sequence having at least 95% identity to an amino acid sequence of SEQ ID NO:4046. In one aspect, provided herein is an antibody that binds TRDV2, comprising a heavy chain having an amino acid sequence having at least 95% identity to an amino acid sequence of SEQ ID NO:4045, and a light chain having an amino acid sequence having at least 95% identity to an amino acid sequence of SEQ ID NO:4046.

[0227] In one aspect, provided herein is an antibody that binds TRDV2, comprising: (i) a VH comprising a VH CDR1, a VH CDR2, and a VH CDR3 having an amino acid sequence of SEQ ID NOs:4047, 4048, and 4049, respectively, and (ii) a VL comprising a VL CDR1, VL CDR2, and VL CDR3 having an amino acid sequence of SEQ ID NOs:4050, 4051, and 4052, respectively. In one aspect, provided herein is an antibody that binds TRDV2, comprising: (i) a VH comprising a VH CDR1, a VH CDR2, and a VH CDR3 having an amino acid sequence of SEQ ID NOs:4053, 4054, and 4055, respectively, and (ii) a VL comprising a VL CDR1, VL CDR2, and VL CDR3 having an amino acid sequence of SEQ ID NOs:4056, 4057, and 4058, respectively. In one aspect, provided herein is an antibody that binds TRDV2, comprising: (i) a VH comprising a VH CDR1, a VH CDR2, and a VH CDR3 having an amino acid sequence of SEQ ID NOs:4059, 4060, and 4061, respectively, and (ii) a VL comprising a VL CDR1, VL CDR2, and VL CDR3 having an amino acid sequence of SEQ ID NOs:4062, 4063, and 4064, respectively. In one aspect, provided herein is an antibody that binds TRDV2, comprising: (i) a VH comprising a VH CDR1, a VH CDR2, and a VH CDR3 having an amino acid sequence of SEQ ID NOs:4065, 4066, and 4067, respectively, and (ii) a VL comprising a VL CDR1, VL CDR2, and VL CDR3 having an amino acid sequence of SEQ ID NOs:4068, 4069, and 4070, respectively. In one aspect, provided herein is an antibody that binds TRDV2, comprising: (i) a VH comprising a VH CDR1, a VH CDR2, and a VH CDR3 having an amino acid sequence of SEQ ID NOs:4071, 4072, and 4073, respectively, and (ii) a VL comprising a VL CDR1, VL CDR2, and VL CDR3 having an amino acid sequence of SEQ ID NOs:4074, 4075, and 4076, respectively. In one aspect, provided herein is an antibody that binds TRDV2, comprising: (i) a VH comprising a VH CDR1, a VH CDR2, and a VH CDR3 having an amino acid sequence of a VH CDR1, a VH CDR2, and a VH CDR3, respectively, of a VH having an amino acid sequence of SEQ ID NO:4077; and (ii) a VL comprising a VL CDR1, a VL CDR2, and a VL CDR3 having an amino acid sequence of a VL CDR1, a VL CDR2, and a VL CDR3, respectively, of SEQ ID NO:4078. In one aspect, provided herein is an antibody that binds TRDV2, comprising a VH having an amino acid sequence of SEQ ID NO:4077. In one aspect, provided herein is an antibody that binds TRDV2, comprising a VL having an amino acid sequence of SEQ ID NO:4078. In one aspect, provided herein is an antibody that binds TRDV2, comprising a VH having an amino acid sequence of SEQ ID NO:4077, and a VL having an amino acid sequence of SEQ ID NO:4078. In one aspect, provided herein is an antibody that binds TRDV2, comprising a heavy chain having an amino acid sequence of SEQ ID NO:4079. In one aspect, provided herein is an antibody that binds TRDV2, comprising a light chain having an amino acid sequence of SEQ ID NO:4080. In one aspect, provided herein is an antibody that binds TRDV2, comprising a heavy chain having an amino acid sequence of SEQ ID NO:4079, and a light chain having an amino acid sequence of SEQ ID NO:4080. In one aspect, provided herein is an antibody that binds TRDV2, comprising a VH having an amino acid sequence having at least 95% identity to an amino acid sequence of SEQ ID NO:4077. In one aspect, provided herein is an antibody that binds TRDV2, comprising a VL having an amino acid sequence having at least 95% identity to an amino acid sequence of SEQ ID NO:4078. In one aspect, provided herein is an antibody that binds TRDV2, comprising a VH having an amino acid sequence having at least 95% identity to an amino acid sequence of SEQ ID NO:4077, and a VL having an amino acid sequence having at least 95% identity to an amino acid sequence of SEQ ID NO:4078. In one aspect, provided herein is an antibody that binds TRDV2, comprising a heavy chain having an amino acid sequence having at least 95% identity to an amino acid sequence of SEQ ID NO:4079. In one aspect, provided herein is an antibody that binds TRDV2, comprising a light chain having an amino acid sequence having at least 95% identity to an amino acid sequence of SEQ ID NO:4080. In one aspect, provided herein is an antibody that binds TRDV2, comprising a heavy chain having an amino acid sequence having at least 95% identity to an amino acid sequence of SEQ ID NO:4079, and a light chain having an amino acid sequence having at least 95% identity to an amino acid sequence of SEQ ID NO:4080.

[0228] In one aspect, provided herein is an antibody that binds TRDV2, comprising: (i) a VH comprising a VH CDR1, a VH CDR2, and a VH CDR3 having an amino acid sequence of SEQ ID NOs:4081, 4082, and 4083, respectively, and (ii) a VL comprising a VL CDR1, VL CDR2, and VL CDR3 having an amino acid sequence of SEQ ID NOs:4084, 4085, and 4086, respectively. In one aspect, provided herein is an antibody that binds TRDV2, comprising: (i) a VH comprising a VH CDR1, a VH CDR2, and a VH CDR3 having an amino acid sequence of SEQ ID NOs:4087, 4088, and 4089, respectively, and (ii) a VL comprising a VL CDR1, VL CDR2, and VL CDR3 having an amino acid sequence of SEQ ID NOs:4090, 4091, and 4092, respectively. In one aspect, provided herein is an antibody that binds TRDV2, comprising: (i) a VH comprising a VH CDR1, a VH CDR2, and a VH CDR3 having an amino acid sequence of SEQ ID NOs:4093, 4094, and 4095, respectively, and (ii) a VL comprising a VL CDR1, VL CDR2, and VL CDR3 having an amino acid sequence of SEQ ID NOs:4096, 4097, and 4098, respectively. In one aspect, provided herein is an antibody that binds TRDV2, comprising: (i) a VH comprising a VH CDR1, a VH CDR2, and a VH CDR3 having an amino acid sequence of SEQ ID NOs:4099, 4100, and 4101, respectively, and (ii) a VL comprising a VL CDR1, VL CDR2, and VL CDR3 having an amino acid sequence of SEQ ID NOs:4102, 4103, and 4104, respectively. In one aspect, provided herein is an antibody that binds TRDV2, comprising: (i) a VH comprising a VH CDR1, a VH CDR2, and a VH CDR3 having an amino acid sequence of SEQ ID NOs:4105, 4106, and 4107, respectively, and (ii) a VL comprising a VL CDR1, VL CDR2, and VL CDR3 having an amino acid sequence of SEQ ID NOs:4108, 4109, and 4110, respectively. In one aspect, provided herein is an antibody that binds TRDV2, comprising: (i) a VH comprising a VH CDR1, a VH CDR2, and a VH CDR3 having an amino acid sequence of a VH CDR1, a VH CDR2, and a VH CDR3, respectively, of a VH having an amino acid sequence of SEQ ID NO:4111; and (ii) a VL comprising a VL CDR1, a VL CDR2, and a VL CDR3 having an amino acid sequence of a VL CDR1, a VL CDR2, and a VL CDR3, respectively, of SEQ ID NO:4112. In one aspect, provided herein is an antibody that binds TRDV2, comprising a VH having an amino acid sequence of SEQ ID NO:4111. In one aspect, provided herein is an antibody that binds TRDV2, comprising a VL having an amino acid sequence of SEQ ID NO:4112. In one aspect, provided herein is an antibody that binds TRDV2, comprising a VH having an amino acid sequence of SEQ ID NO:4111, and a VL having an amino acid sequence of SEQ ID NO:4112. In one aspect, provided herein is an antibody that binds TRDV2, comprising a heavy chain having an amino acid sequence of SEQ ID NO:4113. In one aspect, provided herein is an antibody that binds TRDV2, comprising a light chain having an amino acid sequence of SEQ ID NO:4114. In one aspect, provided herein is an antibody that binds TRDV2, comprising a heavy chain having an amino acid sequence of SEQ ID NO:4113, and a light chain having an amino acid sequence of SEQ ID NO:4114. In one aspect, provided herein is an antibody that binds TRDV2, comprising a VH having an amino acid sequence having at least 95% identity to an amino acid sequence of SEQ ID NO:4111. In one aspect, provided herein is an antibody that binds TRDV2, comprising a VL having an amino acid sequence having at least 95% identity to an amino acid sequence of SEQ ID NO:4112. In one aspect, provided herein is an antibody that binds TRDV2, comprising a VH having an amino acid sequence having at least 95% identity to an amino acid sequence of SEQ ID NO:4111, and a VL having an amino acid sequence having at least 95% identity to an amino acid sequence of SEQ ID NO:4112. In one aspect, provided herein is an antibody that binds TRDV2, comprising a heavy chain having an amino acid sequence having at least 95% identity to an amino acid sequence of SEQ ID NO:4113. In one aspect, provided herein is an antibody that binds TRDV2, comprising a light chain having an amino acid sequence having at least 95% identity to an amino acid sequence of SEQ ID NO:4114. In one aspect, provided herein is an antibody that binds TRDV2, comprising a heavy chain having an amino acid sequence having at least 95% identity to an amino acid sequence of SEQ ID NO:4113, and a light chain having an amino acid sequence having at least 95% identity to an amino acid sequence of SEQ ID NO:4114.

[0229] In one aspect, provided herein is an antibody that binds TRDV2. In one embodiment, the TRDV2 antibody comprises: a VH comprising a VH CDR1, a VH CDR2, and a VH CDR3 having an amino acid sequence of a VH CDR1, a VH CDR2, and a VH CDR3, respectively, of a VH having an amino acid sequence of SEQ ID NO:2037. In one embodiment, the TRDV2 antibody comprises: a VL comprising a VL CDR1, a VL CDR2, and a VL CDR3 having an amino acid sequence of a VL CDR1, a VL CDR2, and a VL CDR3, respectively, of a VL having an amino acid sequence of SEQ ID NO:2038. In one embodiment, the TRDV2 antibody comprises: a VH comprising a VH CDR1, a VH CDR2, and a VH CDR3 having an amino acid sequence of a VH CDR1, a VH CDR2, and a VH CDR3, respectively, of a VH having an amino acid sequence of SEQ ID NO:2037; and a VL comprising a VL CDR1, a VL CDR2, and a VL CDR3 having an amino acid sequence of a VL CDR1, a VL CDR2, and a VL CDR3, respectively, of a VL having an amino acid sequence of SEQ ID NO:2038. In one embodiment, the TRDV2 antibody comprises: a VH comprising a VH CDR1, a VH CDR2, and a VH CDR3 having an amino acid sequence of a VH CDR1, a VH CDR2, and a VH CDR3, respectively, of a VH having an amino acid sequence of SEQ ID NO:2071. In one embodiment, the TRDV2 antibody comprises: a VL comprising a VL CDR1, a VL CDR2, and a VL CDR3 having an amino acid sequence of a VL CDR1, a VL CDR2, and a VL CDR3, respectively, of a VL having an amino acid sequence of SEQ ID NO:2072. In one embodiment, the TRDV2 antibody comprises: a VH comprising a VH CDR1, a VH CDR2, and a VH CDR3 having an amino acid sequence of a VH CDR1, a VH CDR2, and a VH CDR3, respectively, of a VH having an amino acid sequence of SEQ ID NO:2071; and a VL comprising a VL CDR1, a VL CDR2, and a VL CDR3 having an amino acid sequence of a VL CDR1, a VL CDR2, and a VL CDR3, respectively, of a VL having an amino acid sequence of SEQ ID NO:2072. In one embodiment, the TRDV2 antibody comprises: a VH comprising a VH CDR1, a VH CDR2, and a VH CDR3 having an amino acid sequence of a VH CDR1, a VH CDR2, and a VH CDR3, respectively, of a VH having an amino acid sequence of SEQ ID NO:2105. In one embodiment, the TRDV2 antibody comprises: a VL comprising a VL CDR1, a VL CDR2, and a VL CDR3 having an amino acid sequence of a VL CDR1, a VL CDR2, and a VL CDR3, respectively, of a VL having an amino acid sequence of SEQ ID NO:2106. In one embodiment, the TRDV2 antibody comprises: a VH comprising a VH CDR1, a VH CDR2, and a VH CDR3 having an amino acid sequence of a VH CDR1, a VH CDR2, and a VH CDR3, respectively, of a VH having an amino acid sequence of SEQ ID NO:2105; and a VL comprising a VL CDR1, a VL CDR2, and a VL CDR3 having an amino acid sequence of a VL CDR1, a VL CDR2, and a VL CDR3, respectively, of a VL having an amino acid sequence of SEQ ID NO:2106. In one embodiment, the TRDV2 antibody comprises: a VH comprising a VH CDR1, a VH CDR2, and a VH CDR3 having an amino acid sequence of a VH CDR1, a VH CDR2, and a VH CDR3, respectively, of a VH having an amino acid sequence of SEQ ID NO:2139. In one embodiment, the TRDV2 antibody comprises: a VL comprising a VL CDR1, a VL CDR2, and a VL CDR3 having an amino acid sequence of a VL CDR1, a VL CDR2, and a VL CDR3, respectively, of a VL having an amino acid sequence of SEQ ID NO:2140. In one embodiment, the TRDV2 antibody comprises: a VH comprising a VH CDR1, a VH CDR2, and a VH CDR3 having an amino acid sequence of a VH CDR1, a VH CDR2, and a VH CDR3, respectively, of a VH having an amino acid sequence of SEQ ID NO:2139; and a VL comprising a VL CDR1, a VL CDR2, and a VL CDR3 having an amino acid sequence of a VL CDR1, a VL CDR2, and a VL CDR3, respectively, of a VL having an amino acid sequence of SEQ ID NO:2140. In one embodiment, the TRDV2 antibody comprises: a VH comprising a VH CDR1, a VH CDR2, and a VH CDR3 having an amino acid sequence of a VH CDR1, a VH CDR2, and a VH CDR3, respectively, of a VH having an amino acid sequence of SEQ ID NO:2173. In one embodiment, the TRDV2 antibody comprises: a VL comprising a VL CDR1, a VL CDR2, and a VL CDR3 having an amino acid sequence of a VL CDR1, a VL CDR2, and a VL CDR3, respectively, of a VL having an amino acid sequence of SEQ ID NO:2174. In one embodiment, the TRDV2 antibody comprises: a VH comprising a VH CDR1, a VH CDR2, and a VH CDR3 having an amino acid sequence of a VH CDR1, a VH CDR2, and a VH CDR3, respectively, of a VH having an amino acid sequence of SEQ ID NO:2173; and a VL comprising a VL CDR1, a VL CDR2, and a VL CDR3 having an amino acid sequence of a VL CDR1, a VL CDR2, and a VL CDR3, respectively, of a VL having an amino acid sequence of SEQ ID NO:2174. In one embodiment, the TRDV2 antibody comprises: a VH comprising a VH CDR1, a VH CDR2, and a VH CDR3 having an amino acid sequence of a VH CDR1, a VH CDR2, and a VH CDR3, respectively, of a VH having an amino acid sequence of SEQ ID NO:2207. In one embodiment, the TRDV2 antibody comprises: a VL comprising a VL CDR1, a VL CDR2, and a VL CDR3 having an amino acid sequence of a VL CDR1, a VL CDR2, and a VL CDR3, respectively, of a VL having an amino acid sequence of SEQ ID NO:2208. In one embodiment, the TRDV2 antibody comprises: a VH comprising a VH CDR1, a VH CDR2, and a VH CDR3 having an amino acid sequence of a VH CDR1, a VH CDR2, and a VH CDR3, respectively, of a VH having an amino acid sequence of SEQ ID NO:2207; and a VL comprising a VL CDR1, a VL CDR2, and a VL CDR3 having an amino acid sequence of a VL CDR1, a VL CDR2, and a VL CDR3, respectively, of a VL having an amino acid sequence of SEQ ID NO:2208. In one embodiment, the TRDV2 antibody comprises: a VH comprising a VH CDR1, a VH CDR2, and a VH CDR3 having an amino acid sequence of a VH CDR1, a VH CDR2, and a VH CDR3, respectively, of a VH having an amino acid sequence of SEQ ID NO:2241. In one embodiment, the TRDV2 antibody comprises: a VL comprising a VL CDR1, a VL CDR2, and a VL CDR3 having an amino acid sequence of a VL CDR1, a VL CDR2, and a VL CDR3, respectively, of a VL having an amino acid sequence of SEQ ID NO:2242. In one embodiment, the TRDV2 antibody comprises: a VH comprising a VH CDR1, a VH CDR2, and a VH CDR3 having an amino acid sequence of a VH CDR1, a VH CDR2, and a VH CDR3, respectively, of a VH having an amino acid sequence of SEQ ID NO:2241; and a VL comprising a VL CDR1, a VL CDR2, and a VL CDR3 having an amino acid sequence of a VL CDR1, a VL CDR2, and a VL CDR3, respectively, of a VL having an amino acid sequence of SEQ ID NO:2242. In one embodiment, the TRDV2 antibody comprises: a VH comprising a VH CDR1, a VH CDR2, and a VH CDR3 having an amino acid sequence of a VH CDR1, a VH CDR2, and a VH CDR3, respectively, of a VH having an amino acid sequence of SEQ ID NO:2275. In one embodiment, the TRDV2 antibody comprises: a VL comprising a VL CDR1, a VL CDR2, and a VL CDR3 having an amino acid sequence of a VL CDR1, a VL CDR2, and a VL CDR3, respectively, of a VL having an amino acid sequence of SEQ ID NO:2276. In one embodiment, the TRDV2 antibody comprises: a VH comprising a VH CDR1, a VH CDR2, and a VH CDR3 having an amino acid sequence of a VH CDR1, a VH CDR2, and a VH CDR3, respectively, of a VH having an amino acid sequence of SEQ ID NO:2275; and a VL comprising a VL CDR1, a VL CDR2, and a VL CDR3 having an amino acid sequence of a VL CDR1, a VL CDR2, and a VL CDR3, respectively, of a VL having an amino acid sequence of SEQ ID NO:2276. In one embodiment, the TRDV2 antibody comprises: a VH comprising a VH CDR1, a VH CDR2, and a VH CDR3 having an amino acid sequence of a VH CDR1, a VH CDR2, and a VH CDR3, respectively, of a VH having an amino acid sequence of SEQ ID NO:2309. In one embodiment, the TRDV2 antibody comprises: a VL comprising a VL CDR1, a VL CDR2, and a VL CDR3 having an amino acid sequence of a VL CDR1, a VL CDR2, and a VL CDR3, respectively, of a VL having an amino acid sequence of SEQ ID NO:2310. In one embodiment, the TRDV2 antibody comprises: a VH comprising a VH CDR1, a VH CDR2, and a VH CDR3 having an amino acid sequence of a VH CDR1, a VH CDR2, and a VH CDR3, respectively, of a VH having an amino acid sequence of SEQ ID NO:2309; and a VL comprising a VL CDR1, a VL CDR2, and a VL CDR3 having an amino acid sequence of a VL CDR1, a VL CDR2, and a VL CDR3, respectively, of a VL having an amino acid sequence of SEQ ID NO:2310. In one embodiment, the TRDV2 antibody comprises: a VH comprising a VH CDR1, a VH CDR2, and a VH CDR3 having an amino acid sequence of a VH CDR1, a VH CDR2, and a VH CDR3, respectively, of a VH having an amino acid sequence of SEQ ID NO:2343. In one embodiment, the TRDV2 antibody comprises: a VL comprising a VL CDR1, a VL CDR2, and a VL CDR3 having an amino acid sequence of a VL CDR1, a VL CDR2, and a VL CDR3, respectively, of a VL having an amino acid sequence of SEQ ID NO:2344. In one embodiment, the TRDV2 antibody comprises: a VH comprising a VH CDR1, a VH CDR2, and a VH CDR3 having an amino acid sequence of a VH CDR1, a VH CDR2, and a VH CDR3, respectively, of a VH having an amino acid sequence of SEQ ID NO:2343; and a VL comprising a VL CDR1, a VL CDR2, and a VL CDR3 having an amino acid sequence of a VL CDR1, a VL CDR2, and a VL CDR3, respectively, of a VL having an amino acid sequence of SEQ ID NO:2344. In one embodiment, the TRDV2 antibody comprises: a VH comprising a VH CDR1, a VH CDR2, and a VH CDR3 having an amino acid sequence of a VH CDR1, a VH CDR2, and a VH CDR3, respectively, of a VH having an amino acid sequence of SEQ ID NO:2377. In one embodiment, the TRDV2 antibody comprises: a VL comprising a VL CDR1, a VL CDR2, and a VL CDR3 having an amino acid sequence of a VL CDR1, a VL CDR2, and a VL CDR3, respectively, of a VL having an amino acid sequence of SEQ ID NO:2378. In one embodiment, the TRDV2 antibody comprises: a VH comprising a VH CDR1, a VH CDR2, and a VH CDR3 having an amino acid sequence of a VH CDR1, a VH CDR2, and a VH CDR3, respectively, of a VH having an amino acid sequence of SEQ ID NO:2377; and a VL comprising a VL CDR1, a VL CDR2, and a VL CDR3 having an amino acid sequence of a VL CDR1, a VL CDR2, and a VL CDR3, respectively, of a VL having an amino acid sequence of SEQ ID NO:2378. In one embodiment, the TRDV2 antibody comprises: a VH comprising a VH CDR1, a VH CDR2, and a VH CDR3 having an amino acid sequence of a VH CDR1, a VH CDR2, and a VH CDR3, respectively, of a VH having an amino acid sequence of SEQ ID NO:2411. In one embodiment, the TRDV2 antibody comprises: a VL comprising a VL CDR1, a VL CDR2, and a VL CDR3 having an amino acid sequence of a VL CDR1, a VL CDR2, and a VL CDR3, respectively, of a VL having an amino acid sequence of SEQ ID NO:2412. In one embodiment, the TRDV2 antibody comprises: a VH comprising a VH CDR1, a VH CDR2, and a VH CDR3 having an amino acid sequence of a VH CDR1, a VH CDR2, and a VH CDR3, respectively, of a VH having an amino acid sequence of SEQ ID NO:2411; and a VL comprising a VL CDR1, a VL CDR2, and a VL CDR3 having an amino acid sequence of a VL CDR1, a VL CDR2, and a VL CDR3, respectively, of a VL having an amino acid sequence of SEQ ID NO:2412. In one embodiment, the TRDV2 antibody comprises: a VH comprising a VH CDR1, a VH CDR2, and a VH CDR3 having an amino acid sequence of a VH CDR1, a VH CDR2, and a VH CDR3, respectively, of a VH having an amino acid sequence of SEQ ID NO:2445. In one embodiment, the TRDV2 antibody comprises: a VL comprising a VL CDR1, a VL CDR2, and a VL CDR3 having an amino acid sequence of a VL CDR1, a VL CDR2, and a VL CDR3, respectively, of a VL having an amino acid sequence of SEQ ID NO:2446. In one embodiment, the TRDV2 antibody comprises: a VH comprising a VH CDR1, a VH CDR2, and a VH CDR3 having an amino acid sequence of a VH CDR1, a VH CDR2, and a VH CDR3, respectively, of a VH having an amino acid sequence of SEQ ID NO:2445; and a VL comprising a VL CDR1, a VL CDR2, and a VL CDR3 having an amino acid sequence of a VL CDR1, a VL CDR2, and a VL CDR3, respectively, of a VL having an amino acid sequence of SEQ ID NO:2446. In one embodiment, the TRDV2 antibody comprises: a VH comprising a VH CDR1, a VH CDR2, and a VH CDR3 having an amino acid sequence of a VH CDR1, a VH CDR2, and a VH CDR3, respectively, of a VH having an amino acid sequence of SEQ ID NO:2479. In one embodiment, the TRDV2 antibody comprises: a VL comprising a VL CDR1, a VL CDR2, and a VL CDR3 having an amino acid sequence of a VL CDR1, a VL CDR2, and a VL CDR3, respectively, of a VL having an amino acid sequence of SEQ ID NO:2480. In one embodiment, the TRDV2 antibody comprises: a VH comprising a VH CDR1, a VH CDR2, and a VH CDR3 having an amino acid sequence of a VH CDR1, a VH CDR2, and a VH CDR3, respectively, of a VH having an amino acid sequence of SEQ ID NO:2479; and a VL comprising a VL CDR1, a VL CDR2, and a VL CDR3 having an amino acid sequence of a VL CDR1, a VL CDR2, and a VL CDR3, respectively, of a VL having an amino acid sequence of SEQ ID NO:2480. In one embodiment, the TRDV2 antibody comprises: a VH comprising a VH CDR1, a VH CDR2, and a VH CDR3 having an amino acid sequence of a VH CDR1, a VH CDR2, and a VH CDR3, respectively, of a VH having an amino acid sequence of SEQ ID NO:2513. In one embodiment, the TRDV2 antibody comprises: a VL comprising a VL CDR1, a VL CDR2, and a VL CDR3 having an amino acid sequence of a VL CDR1, a VL CDR2, and a VL CDR3, respectively, of a VL having an amino acid sequence of SEQ ID NO:2514. In one embodiment, the TRDV2 antibody comprises: a VH comprising a VH CDR1, a VH CDR2, and a VH CDR3 having an amino acid sequence of a VH CDR1, a VH CDR2, and a VH CDR3, respectively, of a VH having an amino acid sequence of SEQ ID NO:2513; and a VL comprising a VL CDR1, a VL CDR2, and a VL CDR3 having an amino acid sequence of a VL CDR1, a VL CDR2, and a VL CDR3, respectively, of a VL having an amino acid sequence of SEQ ID NO:2514. In one embodiment, the TRDV2 antibody comprises: a VH comprising a VH CDR1, a VH CDR2, and a VH CDR3 having an amino acid sequence of a VH CDR1, a VH CDR2, and a VH CDR3, respectively, of a VH having an amino acid sequence of SEQ ID NO:2547. In one embodiment, the TRDV2 antibody comprises: a VL comprising a VL CDR1, a VL CDR2, and a VL CDR3 having an amino acid sequence of a VL CDR1, a VL CDR2, and a VL CDR3, respectively, of a VL having an amino acid sequence of SEQ ID NO:2548. In one embodiment, the TRDV2 antibody comprises: a VH comprising a VH CDR1, a VH CDR2, and a VH CDR3 having an amino acid sequence of a VH CDR1, a VH CDR2, and a VH CDR3, respectively, of a VH having an amino acid sequence of SEQ ID NO:2547; and a VL comprising a VL CDR1, a VL CDR2, and a VL CDR3 having an amino acid sequence of a VL CDR1, a VL CDR2, and a VL CDR3, respectively, of a VL having an amino acid sequence of SEQ ID NO:2548. In one embodiment, the TRDV2 antibody comprises: a VH comprising a VH CDR1, a VH CDR2, and a VH CDR3 having an amino acid sequence of a VH CDR1, a VH CDR2, and a VH CDR3, respectively, of a VH having an amino acid sequence of SEQ ID NO:2581. In one embodiment, the TRDV2 antibody comprises: a VL comprising a VL CDR1, a VL CDR2, and a VL CDR3 having an amino acid sequence of a VL CDR1, a VL CDR2, and a VL CDR3, respectively, of a VL having an amino acid sequence of SEQ ID NO:2582. In one embodiment, the TRDV2 antibody comprises: a VH comprising a VH CDR1, a VH CDR2, and a VH CDR3 having an amino acid sequence of a VH CDR1, a VH CDR2, and a VH CDR3, respectively, of a VH having an amino acid sequence of SEQ ID NO:2581; and a VL comprising a VL CDR1, a VL CDR2, and a VL CDR3 having an amino acid sequence of a VL CDR1, a VL CDR2, and a VL CDR3, respectively, of a VL having an amino acid sequence of SEQ ID NO:2582. In one embodiment, the TRDV2 antibody comprises: a VH comprising a VH CDR1, a VH CDR2, and a VH CDR3 having an amino acid sequence of a VH CDR1, a VH CDR2, and a VH CDR3, respectively, of a VH having an amino acid sequence of SEQ ID NO:2615. In one embodiment, the TRDV2 antibody comprises: a VL comprising a VL CDR1, a VL CDR2, and a VL CDR3 having an amino acid sequence of a VL CDR1, a VL CDR2, and a VL CDR3, respectively, of a VL having an amino acid sequence of SEQ ID NO:2616. In one embodiment, the TRDV2 antibody comprises: a VH comprising a VH CDR1, a VH CDR2, and a VH CDR3 having an amino acid sequence of a VH CDR1, a VH CDR2, and a VH CDR3, respectively, of a VH having an amino acid sequence of SEQ ID NO:2615; and a VL comprising a VL CDR1, a VL CDR2, and a VL CDR3 having an amino acid sequence of a VL CDR1, a VL CDR2, and a VL CDR3, respectively, of a VL having an amino acid sequence of SEQ ID NO:2616. In one embodiment, the TRDV2 antibody comprises: a VH comprising a VH CDR1, a VH CDR2, and a VH CDR3 having an amino acid sequence of a VH CDR1, a VH CDR2, and a VH CDR3, respectively, of a VH having an amino acid sequence of SEQ ID NO:2649. In one embodiment, the TRDV2 antibody comprises: a VL comprising a VL CDR1, a VL CDR2, and a VL CDR3 having an amino acid sequence of a VL CDR1, a VL CDR2, and a VL CDR3, respectively, of a VL having an amino acid sequence of SEQ ID NO:2650. In one embodiment, the TRDV2 antibody comprises: a VH comprising a VH CDR1, a VH CDR2, and a VH CDR3 having an amino acid sequence of a VH CDR1, a VH CDR2, and a VH CDR3, respectively, of a VH having an amino acid sequence of SEQ ID NO:2649; and a VL comprising a VL CDR1, a VL CDR2, and a VL CDR3 having an amino acid sequence of a VL CDR1, a VL CDR2, and a VL CDR3, respectively, of a VL having an amino acid sequence of SEQ ID NO:2650. In one embodiment, the TRDV2 antibody comprises: a VH comprising a VH CDR1, a VH CDR2, and a VH CDR3 having an amino acid sequence of a VH CDR1, a VH CDR2, and a VH CDR3, respectively, of a VH having an amino acid sequence of SEQ ID NO:2683. In one embodiment, the TRDV2 antibody comprises: a VL comprising a VL CDR1, a VL CDR2, and a VL CDR3 having an amino acid sequence of a VL CDR1, a VL CDR2, and a VL CDR3, respectively, of a VL having an amino acid sequence of SEQ ID NO:2684. In one embodiment, the TRDV2 antibody comprises: a VH comprising a VH CDR1, a VH CDR2, and a VH CDR3 having an amino acid sequence of a VH CDR1, a VH CDR2, and a VH CDR3, respectively, of a VH having an amino acid sequence of SEQ ID NO:2683; and a VL comprising a VL CDR1, a VL CDR2, and a VL CDR3 having an amino acid sequence of a VL CDR1, a VL CDR2, and a VL CDR3, respectively, of a VL having an amino acid sequence of SEQ ID NO:2684. In one embodiment, the TRDV2 antibody comprises: a VH comprising a VH CDR1, a VH CDR2, and a VH CDR3 having an amino acid sequence of a VH CDR1, a VH CDR2, and a VH CDR3, respectively, of a VH having an amino acid sequence of SEQ ID NO:2717. In one embodiment, the TRDV2 antibody comprises: a VL comprising a VL CDR1, a VL CDR2, and a VL CDR3 having an amino acid sequence of a VL CDR1, a VL CDR2, and a VL CDR3, respectively, of a VL having an amino acid sequence of SEQ ID NO:2718. In one embodiment, the TRDV2 antibody comprises: a VH comprising a VH CDR1, a VH CDR2, and a VH CDR3 having an amino acid sequence of a VH CDR1, a VH CDR2, and a VH CDR3, respectively, of a VH having an amino acid sequence of SEQ ID NO:2717; and a VL comprising a VL CDR1, a VL CDR2, and a VL CDR3 having an amino acid sequence of a VL CDR1, a VL CDR2, and a VL CDR3, respectively, of a VL having an amino acid sequence of SEQ ID NO:2718. In one embodiment, the TRDV2 antibody comprises: a VH comprising a VH CDR1, a VH CDR2, and a VH CDR3 having an amino acid sequence of a VH CDR1, a VH CDR2, and a VH CDR3, respectively, of a VH having an amino acid sequence of SEQ ID NO:2751. In one embodiment, the TRDV2 antibody comprises: a VL comprising a VL CDR1, a VL CDR2, and a VL CDR3 having an amino acid sequence of a VL CDR1, a VL CDR2, and a VL CDR3, respectively, of a VL having an amino acid sequence of SEQ ID NO:2752. In one embodiment, the TRDV2 antibody comprises: a VH comprising a VH CDR1, a VH CDR2, and a VH CDR3 having an amino acid sequence of a VH CDR1, a VH CDR2, and a VH CDR3, respectively, of a VH having an amino acid sequence of SEQ ID NO:2751; and a VL comprising a VL CDR1, a VL CDR2, and a VL CDR3 having an amino acid sequence of a VL CDR1, a VL CDR2, and a VL CDR3, respectively, of a VL having an amino acid sequence of SEQ ID NO:2752. In one embodiment, the TRDV2 antibody comprises: a VH comprising a VH CDR1, a VH CDR2, and a VH CDR3 having an amino acid sequence of a VH CDR1, a VH CDR2, and a VH CDR3, respectively, of a VH having an amino acid sequence of SEQ ID NO:2785. In one embodiment, the TRDV2 antibody comprises: a VL comprising a VL CDR1, a VL CDR2, and a VL CDR3 having an amino acid sequence of a VL CDR1, a VL CDR2, and a VL CDR3, respectively, of a VL having an amino acid sequence of SEQ ID NO:2786. In one embodiment, the TRDV2 antibody comprises: a VH comprising a VH CDR1, a VH CDR2, and a VH CDR3 having an amino acid sequence of a VH CDR1, a VH CDR2, and a VH CDR3, respectively, of a VH having an amino acid sequence of SEQ ID NO:2785; and a VL comprising a VL CDR1, a VL CDR2, and a VL CDR3 having an amino acid sequence of a VL CDR1, a VL CDR2, and a VL CDR3, respectively, of a VL having an amino acid sequence of SEQ ID NO:2786. In one embodiment, the TRDV2 antibody comprises: a VH comprising a VH CDR1, a VH CDR2, and a VH CDR3 having an amino acid sequence of a VH CDR1, a VH CDR2, and a VH CDR3, respectively, of a VH having an amino acid sequence of SEQ ID NO:2819. In one embodiment, the TRDV2 antibody comprises: a VL comprising a VL CDR1, a VL CDR2, and a VL CDR3 having an amino acid sequence of a VL CDR1, a VL CDR2, and a VL CDR3, respectively, of a VL having an amino acid sequence of SEQ ID NO:2820. In one embodiment, the TRDV2 antibody comprises: a VH comprising a VH CDR1, a VH CDR2, and a VH CDR3 having an amino acid sequence of a VH CDR1, a VH CDR2, and a VH CDR3, respectively, of a VH having an amino acid sequence of SEQ ID NO:2819; and a VL comprising a VL CDR1, a VL CDR2, and a VL CDR3 having an amino acid sequence of a VL CDR1, a VL CDR2, and a VL CDR3, respectively, of a VL having an amino acid sequence of SEQ ID NO:2820. In one embodiment, the TRDV2 antibody comprises: a VH comprising a VH CDR1, a VH CDR2, and a VH CDR3 having an amino acid sequence of a VH CDR1, a VH CDR2, and a VH CDR3, respectively, of a VH having an amino acid sequence of SEQ ID NO:2853. In one embodiment, the TRDV2 antibody comprises: a VL comprising a VL CDR1, a VL CDR2, and a VL CDR3 having an amino acid sequence of a VL CDR1, a VL CDR2, and a VL CDR3, respectively, of a VL having an amino acid sequence of SEQ ID NO:2854. In one embodiment, the TRDV2 antibody comprises: a VH comprising a VH CDR1, a VH CDR2, and a VH CDR3 having an amino acid sequence of a VH CDR1, a VH CDR2, and a VH CDR3, respectively, of a VH having an amino acid sequence of SEQ ID NO:2853; and a VL comprising a VL CDR1, a VL CDR2, and a VL CDR3 having an amino acid sequence of a VL CDR1, a VL CDR2, and a VL CDR3, respectively, of a VL having an amino acid sequence of SEQ ID NO:2854. In one embodiment, the TRDV2 antibody comprises: a VH comprising a VH CDR1, a VH CDR2, and a VH CDR3 having an amino acid sequence of a VH CDR1, a VH CDR2, and a VH CDR3, respectively, of a VH having an amino acid sequence of SEQ ID NO:2887. In one embodiment, the TRDV2 antibody comprises: a VL comprising a VL CDR1, a VL CDR2, and a VL CDR3 having an amino acid sequence of a VL CDR1, a VL CDR2, and a VL CDR3, respectively, of a VL having an amino acid sequence of SEQ ID NO:2888. In one embodiment, the TRDV2 antibody comprises: a VH comprising a VH CDR1, a VH CDR2, and a VH CDR3 having an amino acid sequence of a VH CDR1, a VH CDR2, and a VH CDR3, respectively, of a VH having an amino acid sequence of SEQ ID NO:2887; and a VL comprising a VL CDR1, a VL CDR2, and a VL CDR3 having an amino acid sequence of a VL CDR1, a VL CDR2, and a VL CDR3, respectively, of a VL having an amino acid sequence of SEQ ID NO:2888. In one embodiment, the TRDV2 antibody comprises: a VH comprising a VH CDR1, a VH CDR2, and a VH CDR3 having an amino acid sequence of a VH CDR1, a VH CDR2, and a VH CDR3, respectively, of a VH having an amino acid sequence of SEQ ID NO:2921. In one embodiment, the TRDV2 antibody comprises: a VL comprising a VL CDR1, a VL CDR2, and a VL CDR3 having an amino acid sequence of a VL CDR1, a VL CDR2, and a VL CDR3, respectively, of a VL having an amino acid sequence of SEQ ID NO:2922. In one embodiment, the TRDV2 antibody comprises: a VH comprising a VH CDR1, a VH CDR2, and a VH CDR3 having an amino acid sequence of a VH CDR1, a VH CDR2, and a VH CDR3, respectively, of a VH having an amino acid sequence of SEQ ID NO:2921; and a VL comprising a VL CDR1, a VL CDR2, and a VL CDR3 having an amino acid sequence of a VL CDR1, a VL CDR2, and a VL CDR3, respectively, of a VL having an amino acid sequence of SEQ ID NO:2922. In one embodiment, the TRDV2 antibody comprises: a VH comprising a VH CDR1, a VH CDR2, and a VH CDR3 having an amino acid sequence of a VH CDR1, a VH CDR2, and a VH CDR3, respectively, of a VH having an amino acid sequence of SEQ ID NO:2955. In one embodiment, the TRDV2 antibody comprises: a VL comprising a VL CDR1, a VL CDR2, and a VL CDR3 having an amino acid sequence of a VL CDR1, a VL CDR2, and a VL CDR3, respectively, of a VL having an amino acid sequence of SEQ ID NO:2956. In one embodiment, the TRDV2 antibody comprises: a VH comprising a VH CDR1, a VH CDR2, and a VH CDR3 having an amino acid sequence of a VH CDR1, a VH CDR2, and a VH CDR3, respectively, of a VH having an amino acid sequence of SEQ ID NO:2955; and a VL comprising a VL CDR1, a VL CDR2, and a VL CDR3 having an amino acid sequence of a VL CDR1, a VL CDR2, and a VL CDR3, respectively, of a VL having an amino acid sequence of SEQ ID NO:2956. In one embodiment, the TRDV2 antibody comprises: a VH comprising a VH CDR1, a VH CDR2, and a VH CDR3 having an amino acid sequence of a VH CDR1, a VH CDR2, and a VH CDR3, respectively, of a VH having an amino acid sequence of SEQ ID NO:2989. In one embodiment, the TRDV2 antibody comprises: a VL comprising a VL CDR1, a VL CDR2, and a VL CDR3 having an amino acid sequence of a VL CDR1, a VL CDR2, and a VL CDR3, respectively, of a VL having an amino acid sequence of SEQ ID NO:2990. In one embodiment, the TRDV2 antibody comprises: a VH comprising a VH CDR1, a VH CDR2, and a VH CDR3 having an amino acid sequence of a VH CDR1, a VH CDR2, and a VH CDR3, respectively, of a VH having an amino acid sequence of SEQ ID NO:2989; and a VL comprising a VL CDR1, a VL CDR2, and a VL CDR3 having an amino acid sequence of a VL CDR1, a VL CDR2, and a VL CDR3, respectively, of a VL having an amino acid sequence of SEQ ID NO:2990. In one embodiment, the TRDV2 antibody comprises: a VH comprising a VH CDR1, a VH CDR2, and a VH CDR3 having an amino acid sequence of a VH CDR1, a VH CDR2, and a VH CDR3, respectively, of a VH having an amino acid sequence of SEQ ID NO:3023. In one embodiment, the TRDV2 antibody comprises: a VL comprising a VL CDR1, a VL CDR2, and a VL CDR3 having an amino acid sequence of a VL CDR1, a VL CDR2, and a VL CDR3, respectively, of a VL having an amino acid sequence of SEQ ID NO:3024. In one embodiment, the TRDV2 antibody comprises: a VH comprising a VH CDR1, a VH CDR2, and a VH CDR3 having an amino acid sequence of a VH CDR1, a VH CDR2, and a VH CDR3, respectively, of a VH having an amino acid sequence of SEQ ID NO:3023; and a VL comprising a VL CDR1, a VL CDR2, and a VL CDR3 having an amino acid sequence of a VL CDR1, a VL CDR2, and a VL CDR3, respectively, of a VL having an amino acid sequence of SEQ ID NO:3024. In one embodiment, the TRDV2 antibody comprises: a VH comprising a VH CDR1, a VH CDR2, and a VH CDR3 having an amino acid sequence of a VH CDR1, a VH CDR2, and a VH CDR3, respectively, of a VH having an amino acid sequence of SEQ ID NO:3057. In one embodiment, the TRDV2 antibody comprises: a VL comprising a VL CDR1, a VL CDR2, and a VL CDR3 having an amino acid sequence of a VL CDR1, a VL CDR2, and a VL CDR3, respectively, of a VL having an amino acid sequence of SEQ ID NO:3058. In one embodiment, the TRDV2 antibody comprises: a VH comprising a VH CDR1, a VH CDR2, and a VH CDR3 having an amino acid sequence of a VH CDR1, a VH CDR2, and a VH CDR3, respectively, of a VH having an amino acid sequence of SEQ ID NO:3057; and a VL comprising a VL CDR1, a VL CDR2, and a VL CDR3 having an amino acid sequence of a VL CDR1, a VL CDR2, and a VL CDR3, respectively, of a VL having an amino acid sequence of SEQ ID NO:3058. In one embodiment, the TRDV2 antibody comprises: a VH comprising a VH CDR1, a VH CDR2, and a VH CDR3 having an amino acid sequence of a VH CDR1, a VH CDR2, and a VH CDR3, respectively, of a VH having an amino acid sequence of SEQ ID NO:3091. In one embodiment, the TRDV2 antibody comprises: a VL comprising a VL CDR1, a VL CDR2, and a VL CDR3 having an amino acid sequence of a VL CDR1, a VL CDR2, and a VL CDR3, respectively, of a VL having an amino acid sequence of SEQ ID NO:3092. In one embodiment, the TRDV2 antibody comprises: a VH comprising a VH CDR1, a VH CDR2, and a VH CDR3 having an amino acid sequence of a VH CDR1, a VH CDR2, and a VH CDR3, respectively, of a VH having an amino acid sequence of SEQ ID NO:3091; and a VL comprising a VL CDR1, a VL CDR2, and a VL CDR3 having an amino acid sequence of a VL CDR1, a VL CDR2, and a VL CDR3, respectively, of a VL having an amino acid sequence of SEQ ID NO:3092. In one embodiment, the TRDV2 antibody comprises: a VH comprising a VH CDR1, a VH CDR2, and a VH CDR3 having an amino acid sequence of a VH CDR1, a VH CDR2, and a VH CDR3, respectively, of a VH having an amino acid sequence of SEQ ID NO:3125. In one embodiment, the TRDV2 antibody comprises: a VL comprising a VL CDR1, a VL CDR2, and a VL CDR3 having an amino acid sequence of a VL CDR1, a VL CDR2, and a VL CDR3, respectively, of a VL having an amino acid sequence of SEQ ID NO:3126. In one embodiment, the TRDV2 antibody comprises: a VH comprising a VH CDR1, a VH CDR2, and a VH CDR3 having an amino acid sequence of a VH CDR1, a VH CDR2, and a VH CDR3, respectively, of a VH having an amino acid sequence of SEQ ID NO:3125; and a VL comprising a VL CDR1, a VL CDR2, and a VL CDR3 having an amino acid sequence of a VL CDR1, a VL CDR2, and a VL CDR3, respectively, of a VL having an amino acid sequence of SEQ ID NO:3126. In one embodiment, the TRDV2 antibody comprises: a VH comprising a VH CDR1, a VH CDR2, and a VH CDR3 having an amino acid sequence of a VH CDR1, a VH CDR2, and a VH CDR3, respectively, of a VH having an amino acid sequence of SEQ ID NO:3159. In one embodiment, the TRDV2 antibody comprises: a VL comprising a VL CDR1, a VL CDR2, and a VL CDR3 having an amino acid sequence of a VL CDR1, a VL CDR2, and a VL CDR3, respectively, of a VL having an amino acid sequence of SEQ ID NO:3160. In one embodiment, the TRDV2 antibody comprises: a VH comprising a VH CDR1, a VH CDR2, and a VH CDR3 having an amino acid sequence of a VH CDR1, a VH CDR2, and a VH CDR3, respectively, of a VH having an amino acid sequence of SEQ ID NO:3159; and a VL comprising a VL CDR1, a VL CDR2, and a VL CDR3 having an amino acid sequence of a VL CDR1, a VL CDR2, and a VL CDR3, respectively, of a VL having an amino acid sequence of SEQ ID NO:3160. In one embodiment, the TRDV2 antibody comprises: a VH comprising a VH CDR1, a VH CDR2, and a VH CDR3 having an amino acid sequence of a VH CDR1, a VH CDR2, and a VH CDR3, respectively, of a VH having an amino acid sequence of SEQ ID NO:3193. In one embodiment, the TRDV2 antibody comprises: a VL comprising a VL CDR1, a VL CDR2, and a VL CDR3 having an amino acid sequence of a VL CDR1, a VL CDR2, and a VL CDR3, respectively, of a VL having an amino acid sequence of SEQ ID NO:3194. In one embodiment, the TRDV2 antibody comprises: a VH comprising a VH CDR1, a VH CDR2, and a VH CDR3 having an amino acid sequence of a VH CDR1, a VH CDR2, and a VH CDR3, respectively, of a VH having an amino acid sequence of SEQ ID NO:3193; and a VL comprising a VL CDR1, a VL CDR2, and a VL CDR3 having an amino acid sequence of a VL CDR1, a VL CDR2, and a VL CDR3, respectively, of a VL having an amino acid sequence of SEQ ID NO:3194. In one embodiment, the TRDV2 antibody comprises: a VH comprising a VH CDR1, a VH CDR2, and a VH CDR3 having an amino acid sequence of a VH CDR1, a VH CDR2, and a VH CDR3, respectively, of a VH having an amino acid sequence of SEQ ID NO:3227. In one embodiment, the TRDV2 antibody comprises: a VL comprising a VL CDR1, a VL CDR2, and a VL CDR3 having an amino acid sequence of a VL CDR1, a VL CDR2, and a VL CDR3, respectively, of a VL having an amino acid sequence of SEQ ID NO:3228. In one embodiment, the TRDV2 antibody comprises: a VH comprising a VH CDR1, a VH CDR2, and a VH CDR3 having an amino acid sequence of a VH CDR1, a VH CDR2, and a VH CDR3, respectively, of a VH having an amino acid sequence of SEQ ID NO:3227; and a VL comprising a VL CDR1, a VL CDR2, and a VL CDR3 having an amino acid sequence of a VL CDR1, a VL CDR2, and a VL CDR3, respectively, of a VL having an amino acid sequence of SEQ ID NO:3228. In one embodiment, the TRDV2 antibody comprises: a VH comprising a VH CDR1, a VH CDR2, and a VH CDR3 having an amino acid sequence of a VH CDR1, a VH CDR2, and a VH CDR3, respectively, of a VH having an amino acid sequence of SEQ ID NO:3261. In one embodiment, the TRDV2 antibody comprises: a VL comprising a VL CDR1, a VL CDR2, and a VL CDR3 having an amino acid sequence of a VL CDR1, a VL CDR2, and a VL CDR3, respectively, of a VL having an amino acid sequence of SEQ ID NO:3262. In one embodiment, the TRDV2 antibody comprises: a VH comprising a VH CDR1, a VH CDR2, and a VH CDR3 having an amino acid sequence of a VH CDR1, a VH CDR2, and a VH CDR3, respectively, of a VH having an amino acid sequence of SEQ ID NO:3261; and a VL comprising a VL CDR1, a VL CDR2, and a VL CDR3 having an amino acid sequence of a VL CDR1, a VL CDR2, and a VL CDR3, respectively, of a VL having an amino acid sequence of SEQ ID NO:3262. In one embodiment, the TRDV2 antibody comprises: a VH comprising a VH CDR1, a VH CDR2, and a VH CDR3 having an amino acid sequence of a VH CDR1, a VH CDR2, and a VH CDR3, respectively, of a VH having an amino acid sequence of SEQ ID NO:3295. In one embodiment, the TRDV2 antibody comprises: a VL comprising a VL CDR1, a VL CDR2, and a VL CDR3 having an amino acid sequence of a VL CDR1, a VL CDR2, and a VL CDR3, respectively, of a VL having an amino acid sequence of SEQ ID NO:3296. In one embodiment, the TRDV2 antibody comprises: a VH comprising a VH CDR1, a VH CDR2, and a VH CDR3 having an amino acid sequence of a VH CDR1, a VH CDR2, and a VH CDR3, respectively, of a VH having an amino acid sequence of SEQ ID NO:3295; and a VL comprising a VL CDR1, a VL CDR2, and a VL CDR3 having an amino acid sequence of a VL CDR1, a VL CDR2, and a VL CDR3, respectively, of a VL having an amino acid sequence of SEQ ID NO:3296. In one embodiment, the TRDV2 antibody comprises: a VH comprising a VH CDR1, a VH CDR2, and a VH CDR3 having an amino acid sequence of a VH CDR1, a VH CDR2, and a VH CDR3, respectively, of a VH having an amino acid sequence of SEQ ID NO:3329. In one embodiment, the TRDV2 antibody comprises: a VL comprising a VL CDR1, a VL CDR2, and a VL CDR3 having an amino acid sequence of a VL CDR1, a VL CDR2, and a VL CDR3, respectively, of a VL having an amino acid sequence of SEQ ID NO:3330. In one embodiment, the TRDV2 antibody comprises: a VH comprising a VH CDR1, a VH CDR2, and a VH CDR3 having an amino acid sequence of a VH CDR1, a VH CDR2, and a VH CDR3, respectively, of a VH having an amino acid sequence of SEQ ID NO:3329; and a VL comprising a VL CDR1, a VL CDR2, and a VL CDR3 having an amino acid sequence of a VL CDR1, a VL CDR2, and a VL CDR3, respectively, of a VL having an amino acid sequence of SEQ ID NO:3330. In one embodiment, the TRDV2 antibody comprises: a VH comprising a VH CDR1, a VH CDR2, and a VH CDR3 having an amino acid sequence of a VH CDR1, a VH CDR2, and a VH CDR3, respectively, of a VH having an amino acid sequence of SEQ ID NO:3363. In one embodiment, the TRDV2 antibody comprises: a VL comprising a VL CDR1, a VL CDR2, and a VL CDR3 having an amino acid sequence of a VL CDR1, a VL CDR2, and a VL CDR3, respectively, of a VL having an amino acid sequence of SEQ ID NO:3364. In one embodiment, the TRDV2 antibody comprises: a VH comprising a VH CDR1, a VH CDR2, and a VH CDR3 having an amino acid sequence of a VH CDR1, a VH CDR2, and a VH CDR3, respectively, of a VH having an amino acid sequence of SEQ ID NO:3363; and a VL comprising a VL CDR1, a VL CDR2, and a VL CDR3 having an amino acid sequence of a VL CDR1, a VL CDR2, and a VL CDR3, respectively, of a VL having an amino acid sequence of SEQ ID NO:3364. In one embodiment, the TRDV2 antibody comprises: a VH comprising a VH CDR1, a VH CDR2, and a VH CDR3 having an amino acid sequence of a VH CDR1, a VH CDR2, and a VH CDR3, respectively, of a VH having an amino acid sequence of SEQ ID NO:3397. In one embodiment, the TRDV2 antibody comprises: a VL comprising a VL CDR1, a VL CDR2, and a VL CDR3 having an amino acid sequence of a VL CDR1, a VL CDR2, and a VL CDR3, respectively, of a VL having an amino acid sequence of SEQ ID NO:3398. In one embodiment, the TRDV2 antibody comprises: a VH comprising a VH CDR1, a VH CDR2, and a VH CDR3 having an amino acid sequence of a VH CDR1, a VH CDR2, and a VH CDR3, respectively, of a VH having an amino acid sequence of SEQ ID NO:3397; and a VL comprising a VL CDR1, a VL CDR2, and a VL CDR3 having an amino acid sequence of a VL CDR1, a VL CDR2, and a VL CDR3, respectively, of a VL having an amino acid sequence of SEQ ID NO:3398. In one embodiment, the TRDV2 antibody comprises: a VH comprising a VH CDR1, a VH CDR2, and a VH CDR3 having an amino acid sequence of a VH CDR1, a VH CDR2, and a VH CDR3, respectively, of a VH having an amino acid sequence of SEQ ID NO:3431. In one embodiment, the TRDV2 antibody comprises: a VL comprising a VL CDR1, a VL CDR2, and a VL CDR3 having an amino acid sequence of a VL CDR1, a VL CDR2, and a VL CDR3, respectively, of a VL having an amino acid sequence of SEQ ID NO:3432. In one embodiment, the TRDV2 antibody comprises: a VH comprising a VH CDR1, a VH CDR2, and a VH CDR3 having an amino acid sequence of a VH CDR1, a VH CDR2, and a VH CDR3, respectively, of a VH having an amino acid sequence of SEQ ID NO:3431; and a VL comprising a VL CDR1, a VL CDR2, and a VL CDR3 having an amino acid sequence of a VL CDR1, a VL CDR2, and a VL CDR3, respectively, of a VL having an amino acid sequence of SEQ ID NO:3432. In one embodiment, the TRDV2 antibody comprises: a VH comprising a VH CDR1, a VH CDR2, and a VH CDR3 having an amino acid sequence of a VH CDR1, a VH CDR2, and a VH CDR3, respectively, of a VH having an amino acid sequence of SEQ ID NO:3465. In one embodiment, the TRDV2 antibody comprises: a VL comprising a VL CDR1, a VL CDR2, and a VL CDR3 having an amino acid sequence of a VL CDR1, a VL CDR2, and a VL CDR3, respectively, of a VL having an amino acid sequence of SEQ ID NO:3466. In one embodiment, the TRDV2 antibody comprises: a VH comprising a VH CDR1, a VH CDR2, and a VH CDR3 having an amino acid sequence of a VH CDR1, a VH CDR2, and a VH CDR3, respectively, of a VH having an amino acid sequence of SEQ ID NO:3465; and a VL comprising a VL CDR1, a VL CDR2, and a VL CDR3 having an amino acid sequence of a VL CDR1, a VL CDR2, and a VL CDR3, respectively, of a VL having an amino acid sequence of SEQ ID NO:3466. In one embodiment, the TRDV2 antibody comprises: a VH comprising a VH CDR1, a VH CDR2, and a VH CDR3 having an amino acid sequence of a VH CDR1, a VH CDR2, and a VH CDR3, respectively, of a VH having an amino acid sequence of SEQ ID NO:3499. In one embodiment, the TRDV2 antibody comprises: a VL comprising a VL CDR1, a VL CDR2, and a VL CDR3 having an amino acid sequence of a VL CDR1, a VL CDR2, and a VL CDR3, respectively, of a VL having an amino acid sequence of SEQ ID NO:3500. In one embodiment, the TRDV2 antibody comprises: a VH comprising a VH CDR1, a VH CDR2, and a VH CDR3 having an amino acid sequence of a VH CDR1, a VH CDR2, and a VH CDR3, respectively, of a VH having an amino acid sequence of SEQ ID NO:3499; and a VL comprising a VL CDR1, a VL CDR2, and a VL CDR3 having an amino acid sequence of a VL CDR1, a VL CDR2, and a VL CDR3, respectively, of a VL having an amino acid sequence of SEQ ID NO:3500. In one embodiment, the TRDV2 antibody comprises: a VH comprising a VH CDR1, a VH CDR2, and a VH CDR3 having an amino acid sequence of a VH CDR1, a VH CDR2, and a VH CDR3, respectively, of a VH having an amino acid sequence of SEQ ID NO:3533. In one embodiment, the TRDV2 antibody comprises: a VL comprising a VL CDR1, a VL CDR2, and a VL CDR3 having an amino acid sequence of a VL CDR1, a VL CDR2, and a VL CDR3, respectively, of a VL having an amino acid sequence of SEQ ID NO:3534. In one embodiment, the TRDV2 antibody comprises: a VH comprising a VH CDR1, a VH CDR2, and a VH CDR3 having an amino acid sequence of a VH CDR1, a VH CDR2, and a VH CDR3, respectively, of a VH having an amino acid sequence of SEQ ID NO:3533; and a VL comprising a VL CDR1, a VL CDR2, and a VL CDR3 having an amino acid sequence of a VL CDR1, a VL CDR2, and a VL CDR3, respectively, of a VL having an amino acid sequence of SEQ ID NO:3534. In one embodiment, the TRDV2 antibody comprises: a VH comprising a VH CDR1, a VH CDR2, and a VH CDR3 having an amino acid sequence of a VH CDR1, a VH CDR2, and a VH CDR3, respectively, of a VH having an amino acid sequence of SEQ ID NO:3567. In one embodiment, the TRDV2 antibody comprises: a VL comprising a VL CDR1, a VL CDR2, and a VL CDR3 having an amino acid sequence of a VL CDR1, a VL CDR2, and a VL CDR3, respectively, of a VL having an amino acid sequence of SEQ ID NO:3568. In one embodiment, the TRDV2 antibody comprises: a VH comprising a VH CDR1, a VH CDR2, and a VH CDR3 having an amino acid sequence of a VH CDR1, a VH CDR2, and a VH CDR3, respectively, of a VH having an amino acid sequence of SEQ ID NO:3567; and a VL comprising a VL CDR1, a VL CDR2, and a VL CDR3 having an amino acid sequence of a VL CDR1, a VL CDR2, and a VL CDR3, respectively, of a VL having an amino acid sequence of SEQ ID NO:3568. In one embodiment, the TRDV2 antibody comprises: a VH comprising a VH CDR1, a VH CDR2, and a VH CDR3 having an amino acid sequence of a VH CDR1, a VH CDR2, and a VH CDR3, respectively, of a VH having an amino acid sequence of SEQ ID NO:3601. In one embodiment, the TRDV2 antibody comprises: a VL comprising a VL CDR1, a VL CDR2, and a VL CDR3 having an amino acid sequence of a VL CDR1, a VL CDR2, and a VL CDR3, respectively, of a VL having an amino acid sequence of SEQ ID NO:3602. In one embodiment, the TRDV2 antibody comprises: a VH comprising a VH CDR1, a VH CDR2, and a VH CDR3 having an amino acid sequence of a VH CDR1, a VH CDR2, and a VH CDR3, respectively, of a VH having an amino acid sequence of SEQ ID NO:3601; and a VL comprising a VL CDR1, a VL CDR2, and a VL CDR3 having an amino acid sequence of a VL CDR1, a VL CDR2, and a VL CDR3, respectively, of a VL having an amino acid sequence of SEQ ID NO:3602. In one embodiment, the TRDV2 antibody comprises: a VH comprising a VH CDR1, a VH CDR2, and a VH CDR3 having an amino acid sequence of a VH CDR1, a VH CDR2, and a VH CDR3, respectively, of a VH having an amino acid sequence of SEQ ID NO:3635. In one embodiment, the TRDV2 antibody comprises: a VL comprising a VL CDR1, a VL CDR2, and a VL CDR3 having an amino acid sequence of a VL CDR1, a VL CDR2, and a VL CDR3, respectively, of a VL having an amino acid sequence of SEQ ID NO:3636. In one embodiment, the TRDV2 antibody comprises: a VH comprising a VH CDR1, a VH CDR2, and a VH CDR3 having an amino acid sequence of a VH CDR1, a VH CDR2, and a VH CDR3, respectively, of a VH having an amino acid sequence of SEQ ID NO:3635; and a VL comprising a VL CDR1, a VL CDR2, and a VL CDR3 having an amino acid sequence of a VL CDR1, a VL CDR2, and a VL CDR3, respectively, of a VL having an amino acid sequence of SEQ ID NO:3636. In one embodiment, the TRDV2 antibody comprises: a VH comprising a VH CDR1, a VH CDR2, and a VH CDR3 having an amino acid sequence of a VH CDR1, a VH CDR2, and a VH CDR3, respectively, of a VH having an amino acid sequence of SEQ ID NO:3669. In one embodiment, the TRDV2 antibody comprises: a VL comprising a VL CDR1, a VL CDR2, and a VL CDR3 having an amino acid sequence of a VL CDR1, a VL CDR2, and a VL CDR3, respectively, of a VL having an amino acid sequence of SEQ ID NO:3670. In one embodiment, the TRDV2 antibody comprises: a VH comprising a VH CDR1, a VH CDR2, and a VH CDR3 having an amino acid sequence of a VH CDR1, a VH CDR2, and a VH CDR3, respectively, of a VH having an amino acid sequence of SEQ ID NO:3669; and a VL comprising a VL CDR1, a VL CDR2, and a VL CDR3 having an amino acid sequence of a VL CDR1, a VL CDR2, and a VL CDR3, respectively, of a VL having an amino acid sequence of SEQ ID NO:3670. In one embodiment, the TRDV2 antibody comprises: a VH comprising a VH CDR1, a VH CDR2, and a VH CDR3 having an amino acid sequence of a VH CDR1, a VH CDR2, and a VH CDR3, respectively, of a VH having an amino acid sequence of SEQ ID NO:3703. In one embodiment, the TRDV2 antibody comprises: a VL comprising a VL CDR1, a VL CDR2, and a VL CDR3 having an amino acid sequence of a VL CDR1, a VL CDR2, and a VL CDR3, respectively, of a VL having an amino acid sequence of SEQ ID NO:3704. In one embodiment, the TRDV2 antibody comprises: a VH comprising a VH CDR1, a VH CDR2, and a VH CDR3 having an amino acid sequence of a VH CDR1, a VH CDR2, and a VH CDR3, respectively, of a VH having an amino acid sequence of SEQ ID NO:3703; and a VL comprising a VL CDR1, a VL CDR2, and a VL CDR3 having an amino acid sequence of a VL CDR1, a VL CDR2, and a VL CDR3, respectively, of a VL having an amino acid sequence of SEQ ID NO:3704. In one embodiment, the TRDV2 antibody comprises: a VH comprising a VH CDR1, a VH CDR2, and a VH CDR3 having an amino acid sequence of a VH CDR1, a VH CDR2, and a VH CDR3, respectively, of a VH having an amino acid sequence of SEQ ID NO:3737. In one embodiment, the TRDV2 antibody comprises: a VL comprising a VL CDR1, a VL CDR2, and a VL CDR3 having an amino acid sequence of a VL CDR1, a VL CDR2, and a VL CDR3, respectively, of a VL having an amino acid sequence of SEQ ID NO:3738. In one embodiment, the TRDV2 antibody comprises: a VH comprising a VH CDR1, a VH CDR2, and a VH CDR3 having an amino acid sequence of a VH CDR1, a VH CDR2, and a VH CDR3, respectively, of a VH having an amino acid sequence of SEQ ID NO:3737; and a VL comprising a VL CDR1, a VL CDR2, and a VL CDR3 having an amino acid sequence of a VL CDR1, a VL CDR2, and a VL CDR3, respectively, of a VL having an amino acid sequence of SEQ ID NO:3738. In one embodiment, the TRDV2 antibody comprises: a VH comprising a VH CDR1, a VH CDR2, and a VH CDR3 having an amino acid sequence of a VH CDR1, a VH CDR2, and a VH CDR3, respectively, of a VH having an amino acid sequence of SEQ ID NO:3771. In one embodiment, the TRDV2 antibody comprises: a VL comprising a VL CDR1, a VL CDR2, and a VL CDR3 having an amino acid sequence of a VL CDR1, a VL CDR2, and a VL CDR3, respectively, of a VL having an amino acid sequence of SEQ ID NO:3772. In one embodiment, the TRDV2 antibody comprises: a VH comprising a VH CDR1, a VH CDR2, and a VH CDR3 having an amino acid sequence of a VH CDR1, a VH CDR2, and a VH CDR3, respectively, of a VH having an amino acid sequence of SEQ ID NO:3771; and a VL comprising a VL CDR1, a VL CDR2, and a VL CDR3 having an amino acid sequence of a VL CDR1, a VL CDR2, and a VL CDR3, respectively, of a VL having an amino acid sequence of SEQ ID NO:3772. In one embodiment, the TRDV2 antibody comprises: a VH comprising a VH CDR1, a VH CDR2, and a VH CDR3 having an amino acid sequence of a VH CDR1, a VH CDR2, and a VH CDR3, respectively, of a VH having an amino acid sequence of SEQ ID NO:3805. In one embodiment, the TRDV2 antibody comprises: a VL comprising a VL CDR1, a VL CDR2, and a VL CDR3 having an amino acid sequence of a VL CDR1, a VL CDR2, and a VL CDR3, respectively, of a VL having an amino acid sequence of SEQ ID NO:3806. In one embodiment, the TRDV2 antibody comprises: a VH comprising a VH CDR1, a VH CDR2, and a VH CDR3 having an amino acid sequence of a VH CDR1, a VH CDR2, and a VH CDR3, respectively, of a VH having an amino acid sequence of SEQ ID NO:3805; and a VL comprising a VL CDR1, a VL CDR2, and a VL CDR3 having an amino acid sequence of a VL CDR1, a VL CDR2, and a VL CDR3, respectively, of a VL having an amino acid sequence of SEQ ID NO:3806. In one embodiment, the TRDV2 antibody comprises: a VH comprising a VH CDR1, a VH CDR2, and a VH CDR3 having an amino acid sequence of a VH CDR1, a VH CDR2, and a VH CDR3, respectively, of a VH having an amino acid sequence of SEQ ID NO:3839. In one embodiment, the TRDV2 antibody comprises: a VL comprising a VL CDR1, a VL CDR2, and a VL CDR3 having an amino acid sequence of a VL CDR1, a VL CDR2, and a VL CDR3, respectively, of a VL having an amino acid sequence of SEQ ID NO:3840. In one embodiment, the TRDV2 antibody comprises: a VH comprising a VH CDR1, a VH CDR2, and a VH CDR3 having an amino acid sequence of a VH CDR1, a VH CDR2, and a VH CDR3, respectively, of a VH having an amino acid sequence of SEQ ID NO:3839; and a VL comprising a VL CDR1, a VL CDR2, and a VL CDR3 having an amino acid sequence of a VL CDR1, a VL CDR2, and a VL CDR3, respectively, of a VL having an amino acid sequence of SEQ ID NO:3840. In one embodiment, the TRDV2 antibody comprises: a VH comprising a VH CDR1, a VH CDR2, and a VH CDR3 having an amino acid sequence of a VH CDR1, a VH CDR2, and a VH CDR3, respectively, of a VH having an amino acid sequence of SEQ ID NO:3873. In one embodiment, the TRDV2 antibody comprises: a VL comprising a VL CDR1, a VL CDR2, and a VL CDR3 having an amino acid sequence of a VL CDR1, a VL CDR2, and a VL CDR3, respectively, of a VL having an amino acid sequence of SEQ ID NO:3874. In one embodiment, the TRDV2 antibody comprises: a VH comprising a VH CDR1, a VH CDR2, and a VH CDR3 having an amino acid sequence of a VH CDR1, a VH CDR2, and a VH CDR3, respectively, of a VH having an amino acid sequence of SEQ ID NO:3873; and a VL comprising a VL CDR1, a VL CDR2, and a VL CDR3 having an amino acid sequence of a VL CDR1, a VL CDR2, and a VL CDR3, respectively, of a VL having an amino acid sequence of SEQ ID NO:3874. In one embodiment, the TRDV2 antibody comprises: a VH comprising a VH CDR1, a VH CDR2, and a VH CDR3 having an amino acid sequence of a VH CDR1, a VH CDR2, and a VH CDR3, respectively, of a VH having an amino acid sequence of SEQ ID NO:3907. In one embodiment, the TRDV2 antibody comprises: a VL comprising a VL CDR1, a VL CDR2, and a VL CDR3 having an amino acid sequence of a VL CDR1, a VL CDR2, and a VL CDR3, respectively, of a VL having an amino acid sequence of SEQ ID NO:3908. In one embodiment, the TRDV2 antibody comprises: a VH comprising a VH CDR1, a VH CDR2, and a VH CDR3 having an amino acid sequence of a VH CDR1, a VH CDR2, and a VH CDR3, respectively, of a VH having an amino acid sequence of SEQ ID NO:3907; and a VL comprising a VL CDR1, a VL CDR2, and a VL CDR3 having an amino acid sequence of a VL CDR1, a VL CDR2, and a VL CDR3, respectively, of a VL having an amino acid sequence of SEQ ID NO:3908. In one embodiment, the TRDV2 antibody comprises: a VH comprising a VH CDR1, a VH CDR2, and a VH CDR3 having an amino acid sequence of a VH CDR1, a VH CDR2, and a VH CDR3, respectively, of a VH having an amino acid sequence of SEQ ID NO:3941. In one embodiment, the TRDV2 antibody comprises: a VL comprising a VL CDR1, a VL CDR2, and a VL CDR3 having an amino acid sequence of a VL CDR1, a VL CDR2, and a VL CDR3, respectively, of a VL having an amino acid sequence of SEQ ID NO:3942. In one embodiment, the TRDV2 antibody comprises: a VH comprising a VH CDR1, a VH CDR2, and a VH CDR3 having an amino acid sequence of a VH CDR1, a VH CDR2, and a VH CDR3, respectively, of a VH having an amino acid sequence of SEQ ID NO:3941; and a VL comprising a VL CDR1, a VL CDR2, and a VL CDR3 having an amino acid sequence of a VL CDR1, a VL CDR2, and a VL CDR3, respectively, of a VL having an amino acid sequence of SEQ ID NO:3942. In one embodiment, the TRDV2 antibody comprises: a VH comprising a VH CDR1, a VH CDR2, and a VH CDR3 having an amino acid sequence of a VH CDR1, a VH CDR2, and a VH CDR3, respectively, of a VH having an amino acid sequence of SEQ ID NO:3975. In one embodiment, the TRDV2 antibody comprises: a VL comprising a VL CDR1, a VL CDR2, and a VL CDR3 having an amino acid sequence of a VL CDR1, a VL CDR2, and a VL CDR3, respectively, of a VL having an amino acid sequence of SEQ ID NO:3976. In one embodiment, the TRDV2 antibody comprises: a VH comprising a VH CDR1, a VH CDR2, and a VH CDR3 having an amino acid sequence of a VH CDR1, a VH CDR2, and a VH CDR3, respectively, of a VH having an amino acid sequence of SEQ ID NO:3975; and a VL comprising a VL CDR1, a VL CDR2, and a VL CDR3 having an amino acid sequence of a VL CDR1, a VL CDR2, and a VL CDR3, respectively, of a VL having an amino acid sequence of SEQ ID NO:3976. In one embodiment, the TRDV2 antibody comprises: a VH comprising a VH CDR1, a VH CDR2, and a VH CDR3 having an amino acid sequence of a VH CDR1, a VH CDR2, and a VH CDR3, respectively, of a VH having an amino acid sequence of SEQ ID NO:4009. In one embodiment, the TRDV2 antibody comprises: a VL comprising a VL CDR1, a VL CDR2, and a VL CDR3 having an amino acid sequence of a VL CDR1, a VL CDR2, and a VL CDR3, respectively, of a VL having an amino acid sequence of SEQ ID NO:4010. In one embodiment, the TRDV2 antibody comprises: a VH comprising a VH CDR1, a VH CDR2, and a VH CDR3 having an amino acid sequence of a VH CDR1, a VH CDR2, and a VH CDR3, respectively, of a VH having an amino acid sequence of SEQ ID NO:4009; and a VL comprising a VL CDR1, a VL CDR2, and a VL CDR3 having an amino acid sequence of a VL CDR1, a VL CDR2, and a VL CDR3, respectively, of a VL having an amino acid sequence of SEQ ID NO:4010. In one embodiment, the TRDV2 antibody comprises: a VH comprising a VH CDR1, a VH CDR2, and a VH CDR3 having an amino acid sequence of a VH CDR1, a VH CDR2, and a VH CDR3, respectively, of a VH having an amino acid sequence of SEQ ID NO:4043. In one embodiment, the TRDV2 antibody comprises: a VL comprising a VL CDR1, a VL CDR2, and a VL CDR3 having an amino acid sequence of a VL CDR1, a VL CDR2, and a VL CDR3, respectively, of a VL having an amino acid sequence of SEQ ID NO:4044. In one embodiment, the TRDV2 antibody comprises: a VH comprising a VH CDR1, a VH CDR2, and a VH CDR3 having an amino acid sequence of a VH CDR1, a VH CDR2, and a VH CDR3, respectively, of a VH having an amino acid sequence of SEQ ID NO:4043; and a VL comprising a VL CDR1, a VL CDR2, and a VL CDR3 having an amino acid sequence of a VL CDR1, a VL CDR2, and a VL CDR3, respectively, of a VL having an amino acid sequence of SEQ ID NO:4044. In one embodiment, the TRDV2 antibody comprises: a VH comprising a VH CDR1, a VH CDR2, and a VH CDR3 having an amino acid sequence of a VH CDR1, a VH CDR2, and a VH CDR3, respectively, of a VH having an amino acid sequence of SEQ ID NO:4077. In one embodiment, the TRDV2 antibody comprises: a VL comprising a VL CDR1, a VL CDR2, and a VL CDR3 having an amino acid sequence of a VL CDR1, a VL CDR2, and a VL CDR3, respectively, of a VL having an amino acid sequence of SEQ ID NO:4078. In one embodiment, the TRDV2 antibody comprises: a VH comprising a VH CDR1, a VH CDR2, and a VH CDR3 having an amino acid sequence of a VH CDR1, a VH CDR2, and a VH CDR3, respectively, of a VH having an amino acid sequence of SEQ ID NO:4077; and a VL comprising a VL CDR1, a VL CDR2, and a VL CDR3 having an amino acid sequence of a VL CDR1, a VL CDR2, and a VL CDR3, respectively, of a VL having an amino acid sequence of SEQ ID NO:4078. In one embodiment, the TRDV2 antibody comprises: a VH comprising a VH CDR1, a VH CDR2, and a VH CDR3 having an amino acid sequence of a VH CDR1, a VH CDR2, and a VH CDR3, respectively, of a VH having an amino acid sequence of SEQ ID NO:4111. In one embodiment, the TRDV2 antibody comprises: a VL comprising a VL CDR1, a VL CDR2, and a VL CDR3 having an amino acid sequence of a VL CDR1, a VL CDR2, and a VL CDR3, respectively, of a VL having an amino acid sequence of SEQ ID NO:4112. In one embodiment, the TRGDC antibody comprises: a VH comprising a VH CDR1, a VH CDR2, and a VH CDR3 having an amino acid sequence of a VH CDR1, a VH CDR2, and a VH CDR3, respectively, of a VH having an amino acid sequence of SEQ ID NO:4111; and a VL comprising a VL CDR1, a VL CDR2, and a VL CDR3 having an amino acid sequence of a VL CDR1, a VL CDR2, and a VL CDR3, respectively, of a VL having an amino acid sequence of SEQ ID NO:4112. In some embodiments, the TRDV2 antibody is a multispecific antibody. In some embodiments, the TRDV2 antibody is a bispecific antibody. In some embodiments, the TRDV2 antibody is a trispecific antibody. In some embodiments, the TRDV2 antibody is a quadraspecific antibody.

[0230] In one aspect, provided herein is an antibody that binds TRDV2, comprising a VH CDR1 having an amino acid sequence of SEQ ID NO:2031, wherein the fifth amino acid is R or S; a VH CDR2 having an amino acid sequence of SEQ ID NO:2032; a VH CDR3 having an amino acid sequence of SEQ ID NO:2033, wherein the sixteenth amino acid is F or Y. In one aspect, provided herein is an antibody that binds TRDV2, comprising a VL CDR1 having an amino acid sequence of SEQ ID NO:2034; a VL CDR2 having an amino acid sequence of SEQ ID NO:2035, wherein the third amino acid is S or T; and a VL CDR3 having an amino acid sequence of SEQ ID NO:2036, wherein the sixth amino acid is R or S, the seventh amino acid is L or M, the eighth amino acid is S or T. In one aspect, provided herein is an antibody that binds TRDV2, comprising a VH CDR1 having an amino acid sequence of SEQ ID NO:2031, wherein the fifth amino acid is R or S; a VH CDR2 having an amino acid sequence of SEQ ID NO:2032; a VH CDR3 having an amino acid sequence of SEQ ID NO:2033, wherein the sixteenth amino acid is F or Y; a VL CDR1 having an amino acid sequence of SEQ ID NO:2034; a VL CDR2 having an amino acid sequence of SEQ ID NO:2035, wherein the third amino acid is S or T; and a VL CDR3 having an amino acid sequence of SEQ ID NO:2036, wherein the sixth amino acid is R or S, the seventh amino acid is L or M, the eighth amino acid is S or T.

[0231] In one aspect, provided herein is an antibody that binds TRDV2, comprising a VH CDR1 having an amino acid sequence of SEQ ID NO:2099, wherein the fifth amino acid is S or T, the eighth amino acid is R or S; a VH CDR2 having an amino acid sequence of SEQ ID NO:2100, wherein the fourth amino acid is D or S, the sixth amino acid is I or S; a VH CDR3 having an amino acid sequence of SEQ ID NO:2101, wherein the third amino acid is D or E, the fourth amino acid is R or S, the sixth amino acid is Y or there is no amino acid added to the sixth position and sequence continues to the seventh position, the eighth amino acid is G or V, the ninth amino acid is P or S. In one aspect, provided herein is an antibody that binds TRDV2, comprising a VL CDR1 having an amino acid sequence of SEQ ID NO:2102; a VL CDR2 having an amino acid sequence of SEQ ID NO:2103; and a VL CDR3 having an amino acid sequence of SEQ ID NO:2104. In one aspect, provided herein is an antibody that binds TRDV2, comprising a VH CDR1 having an amino acid sequence of SEQ ID NO:2099, wherein the fifth amino acid is S or T, the eighth amino acid is R or S; a VH CDR2 having an amino acid sequence of SEQ ID NO:2100, wherein the fourth amino acid is D or S, the sixth amino acid is I or S; a VH CDR3 having an amino acid sequence of SEQ ID NO:2101, wherein the third amino acid is D or E, the fourth amino acid is R or S, the sixth amino acid is Y or there is no amino acid added to the sixth position and sequence continues to the seventh position, the eighth amino acid is G or V, the ninth amino acid is P or S; a VL CDR1 having an amino acid sequence of SEQ ID NO:2102; a VL CDR2 having an amino acid sequence of SEQ ID NO:2103; and a VL CDR3 having an amino acid sequence of SEQ ID NO:2104.

[0232] In one aspect, provided herein is an antibody that binds TRDV2, comprising a VH CDR1 having an amino acid sequence of SEQ ID NO:2133, wherein the second amino acid is D or G, the fifth amino acid is N, S, or T, the sixth amino acid is N or S, the seventh amino acid is H or Y; a VH CDR2 having an amino acid sequence of SEQ ID NO:2134, wherein the first amino acid is I or V, the fourth amino acid is N or S, the sixth amino acid is N or S; a VH CDR3 having an amino acid sequence of SEQ ID NO:2135, wherein the seventh amino acid is E or V, the tenth amino acid is G or T. In one aspect, provided herein is an antibody that binds TRDV2, comprising a VL CDR1 having an amino acid sequence of SEQ ID NO:2136; a VL CDR2 having an amino acid sequence of SEQ ID NO:2137; and a VL CDR3 having an amino acid sequence of SEQ ID NO:2138, wherein the ninth amino acid is G or S. In one aspect, provided herein is an antibody that binds TRDV2, comprising a VH CDR1 having an amino acid sequence of SEQ ID NO:2133, wherein the second amino acid is D or G, the fifth amino acid is N, S, or T, the sixth amino acid is N or S, the seventh amino acid is H or Y; a VH CDR2 having an amino acid sequence of SEQ ID NO:2134, wherein the first amino acid is I or V, the fourth amino acid is N or S, the sixth amino acid is N or S; a VH CDR3 having an amino acid sequence of SEQ ID NO:2135, wherein the seventh amino acid is E or V, the tenth amino acid is G or T; a VL CDR1 having an amino acid sequence of SEQ ID NO:2136; a VL CDR2 having an amino acid sequence of SEQ ID NO:2137; and a VL CDR3 having an amino acid sequence of SEQ ID NO:2138, wherein the ninth amino acid is G or S.

[0233] In one aspect, provided herein is an antibody that binds TRDV2, comprising a VH CDR1 having an amino acid sequence of SEQ ID NO:2269, wherein the first amino acid is G or S, the fifth amino acid is S or T; a VH CDR2 having an amino acid sequence of SEQ ID NO:2270; a VH CDR3 having an amino acid sequence of SEQ ID NO:2271, wherein the seventh amino acid is D or E, the ninth amino acid is D or S, the eighteenth amino acid is G or N. In one aspect, provided herein is an antibody that binds TRDV2, comprising a VL CDR1 having an amino acid sequence of SEQ ID NO:2272; a VL CDR2 having an amino acid sequence of SEQ ID NO:2273; and a VL CDR3 having an amino acid sequence of SEQ ID NO:2274, wherein the third amino acid is F or Y, the sixth amino acid is A or T. In one aspect, provided herein is an antibody that binds TRDV2, comprising a VH CDR1 having an amino acid sequence of SEQ ID NO:2269, wherein the first amino acid is G or S, the fifth amino acid is S or T; a VH CDR2 having an amino acid sequence of SEQ ID NO:2270; a VH CDR3 having an amino acid sequence of SEQ ID NO:2271, wherein the seventh amino acid is D or E, the ninth amino acid is D or S, the eighteenth amino acid is G or N; a VL CDR1 having an amino acid sequence of SEQ ID NO:2272; a VL CDR2 having an amino acid sequence of SEQ ID NO:2273; and a VL CDR3 having an amino acid sequence of SEQ ID NO:2274, wherein the third amino acid is F or Y, the sixth amino acid is A or T.

[0234] In one aspect, provided herein is an antibody that binds TRDV2, comprising a VH CDR1 having an amino acid sequence of SEQ ID NO:2337, wherein the first amino acid is G or N, the fifth amino acid is N or S, the sixth amino acid is G, N, or Y; a VH CDR2 having an amino acid sequence of SEQ ID NO:2338, wherein the second amino acid is F or Y; a VH CDR3 having an amino acid sequence of SEQ ID NO:2339, wherein the second amino acid is K or R, the third amino acid is E or L, the tenth amino acid is S or T, the eleventh amino acid is A or T. In one aspect, provided herein is an antibody that binds TRDV2, comprising a VL CDR1 having an amino acid sequence of SEQ ID NO:2340, wherein the first amino acid is S or T, the fifth amino acid is E or G, the seventh amino acid is D or N; a VL CDR2 having an amino acid sequence of SEQ ID NO:2341; and a VL CDR3 having an amino acid sequence of SEQ ID NO:2342, wherein the first amino acid is A or T. In one aspect, provided herein is an antibody that binds TRDV2, comprising a VH CDR1 having an amino acid sequence of SEQ ID NO:2337, wherein the first amino acid is G or N, the fifth amino acid is N or S, the sixth amino acid is G, N, or Y; a VH CDR2 having an amino acid sequence of SEQ ID NO:2338, wherein the second amino acid is F or Y; a VH CDR3 having an amino acid sequence of SEQ ID NO:2339, wherein the second amino acid is K or R, the third amino acid is E or L, the tenth amino acid is S or T, the eleventh amino acid is A or T; a VL CDR1 having an amino acid sequence of SEQ ID NO:2340, wherein the first amino acid is S or T, the fifth amino acid is E or G, the seventh amino acid is D or N; a VL CDR2 having an amino acid sequence of SEQ ID NO:2341; and a VL CDR3 having an amino acid sequence of SEQ ID NO:2342, wherein the first amino acid is A or T.

[0235] In one aspect, provided herein is an antibody that binds TRDV2, comprising a VH CDR1 having an amino acid sequence of SEQ ID NO:3017, wherein the sixth amino acid is S or T; a VH CDR2 having an amino acid sequence of SEQ ID NO:3018; a VH CDR3 having an amino acid sequence of SEQ ID NO:3019, wherein the eighth amino acid is S or T. In one aspect, provided herein is an antibody that binds TRDV2, comprising a VL CDR1 having an amino acid sequence of SEQ ID NO:3020, wherein the second amino acid is G or S; a VL CDR2 having an amino acid sequence of SEQ ID NO:3021; and a VL CDR3 having an amino acid sequence of SEQ ID NO:3022, wherein the first amino acid is I or M. In one aspect, provided herein is an antibody that binds TRDV2, comprising a VH CDR1 having an amino acid sequence of SEQ ID NO:3017, wherein the sixth amino acid is S or T; a VH CDR2 having an amino acid sequence of SEQ ID NO:3018; a VH CDR3 having an amino acid sequence of SEQ ID NO:3019, wherein the eighth amino acid is S or T; a VL CDR1 having an amino acid sequence of SEQ ID NO:3020, wherein the second amino acid is G or S; a VL CDR2 having an amino acid sequence of SEQ ID NO:3021; and a VL CDR3 having an amino acid sequence of SEQ ID NO:3022, wherein the first amino acid is I or M.

[0236] In one aspect, provided herein is an antibody that binds TRDV2, comprising a VH CDR1 having an amino acid sequence of SEQ ID NO:2983; a VH CDR2 having an amino acid sequence of SEQ ID NO:2984, wherein the third amino acid is P or S; a VH CDR3 having an amino acid sequence of SEQ ID NO:2985, wherein the fourth amino acid is M or V, the sixth amino acid is T or V, the eleventh amino acid is A or D. In one aspect, provided herein is an antibody that binds TRDV2, comprising a VL CDR1 having an amino acid sequence of SEQ ID NO:2986; a VL CDR2 having an amino acid sequence of SEQ ID NO:2987; and a VL CDR3 having an amino acid sequence of SEQ ID NO:2988. In one aspect, provided herein is an antibody that binds TRDV2, comprising a VH CDR1 having an amino acid sequence of SEQ ID NO:2983; a VH CDR2 having an amino acid sequence of SEQ ID NO:2984, wherein the third amino acid is P or S; a VH CDR3 having an amino acid sequence of SEQ ID NO:2985, wherein the fourth amino acid is M or V, the sixth amino acid is T or V, the eleventh amino acid is A or D; a VL CDR1 having an amino acid sequence of SEQ ID NO:2986; a VL CDR2 having an amino acid sequence of SEQ ID NO:2987; and a VL CDR3 having an amino acid sequence of SEQ ID NO:2988.

[0237] In one aspect, provided herein is an antibody that binds to TRGDC. In some embodiments, the antibody comprises a heavy chain variable region and a light chain variable region. In some embodiments, the TRGDC antibody is a humanized antibody.

[0238] In one aspect, provided herein is an antibody that binds TRGDC, comprising: (i) a VH comprising a VH CDR1, a VH CDR2, and a VH CDR3 having an amino acid sequence of SEQ ID NOs:4115, 4116, and 4117, respectively, and (ii) a VL comprising a VL CDR1, VL CDR2, and VL CDR3 having an amino acid sequence of SEQ ID NOs:4118, 4119, and 4120, respectively. In one aspect, provided herein is an antibody that binds TRGDC, comprising: (i) a VH comprising a VH CDR1, a VH CDR2, and a VH CDR3 having an amino acid sequence of SEQ ID NOs:4121, 4122, and 4123, respectively, and (ii) a VL comprising a VL CDR1, VL CDR2, and VL CDR3 having an amino acid sequence of SEQ ID NOs:4124, 4125, and 4126, respectively. In one aspect, provided herein is an antibody that binds TRGDC, comprising: (i) a VH comprising a VH CDR1, a VH CDR2, and a VH CDR3 having an amino acid sequence of SEQ ID NOs:4127, 4128, and 4129, respectively, and (ii) a VL comprising a VL CDR1, VL CDR2, and VL CDR3 having an amino acid sequence of SEQ ID NOs:4130, 4131, and 4132, respectively. In one aspect, provided herein is an antibody that binds TRGDC, comprising: (i) a VH comprising a VH CDR1, a VH CDR2, and a VH CDR3 having an amino acid sequence of SEQ ID NOs:4133, 4134, and 4135, respectively, and (ii) a VL comprising a VL CDR1, VL CDR2, and VL CDR3 having an amino acid sequence of SEQ ID NOs:4136, 4137, and 4138, respectively. In one aspect, provided herein is an antibody that binds TRGDC, comprising: (i) a VH comprising a VH CDR1, a VH CDR2, and a VH CDR3 having an amino acid sequence of SEQ ID NOs:4139, 4140, and 4141, respectively, and (ii) a VL comprising a VL CDR1, VL CDR2, and VL CDR3 having an amino acid sequence of SEQ ID NOs:4142, 4143, and 4144, respectively. In one aspect, provided herein is an antibody that binds TRGDC, comprising: (i) a VH comprising a VH CDR1, a VH CDR2, and a VH CDR3 having an amino acid sequence of a VH CDR1, a VH CDR2, and a VH CDR3, respectively, of a VH having an amino acid sequence of SEQ ID NO:4145; and (ii) a VL comprising a VL CDR1, a VL CDR2, and a VL CDR3 having an amino acid sequence of a VL CDR1, a VL CDR2, and a VL CDR3, respectively, of SEQ ID NO:4146. In one aspect, provided herein is an antibody that binds TRGDC, comprising a VH having an amino acid sequence of SEQ ID NO:4145. In one aspect, provided herein is an antibody that binds TRGDC, comprising a VL having an amino acid sequence of SEQ ID NO:4146. In one aspect, provided herein is an antibody that binds TRGDC, comprising a VH having an amino acid sequence of SEQ ID NO:4145, and a VL having an amino acid sequence of SEQ ID NO:4146. In one aspect, provided herein is an antibody that binds TRGDC, comprising a heavy chain having an amino acid sequence of SEQ ID NO:4147. In one aspect, provided herein is an antibody that binds TRGDC, comprising a light chain having an amino acid sequence of SEQ ID NO:4148. In one aspect, provided herein is an antibody that binds TRGDC, comprising a heavy chain having an amino acid sequence of SEQ ID NO:4147, and a light chain having an amino acid sequence of SEQ ID NO:4148. In one aspect, provided herein is an antibody that binds TRGDC, comprising a VH having an amino acid sequence having at least 95% identity to an amino acid sequence of SEQ ID NO:4145. In one aspect, provided herein is an antibody that binds TRGDC, comprising a VL having an amino acid sequence having at least 95% identity to an amino acid sequence of SEQ ID NO:4146. In one aspect, provided herein is an antibody that binds TRGDC, comprising a VH having an amino acid sequence having at least 95% identity to an amino acid sequence of SEQ ID NO:4145, and a VL having an amino acid sequence having at least 95% identity to an amino acid sequence of SEQ ID NO:4146. In one aspect, provided herein is an antibody that binds TRGDC, comprising a heavy chain having an amino acid sequence having at least 95% identity to an amino acid sequence of SEQ ID NO:4147. In one aspect, provided herein is an antibody that binds TRGDC, comprising a light chain having an amino acid sequence having at least 95% identity to an amino acid sequence of SEQ ID NO:4148. In one aspect, provided herein is an antibody that binds TRGDC, comprising a heavy chain having an amino acid sequence having at least 95% identity to an amino acid sequence of SEQ ID NO:4147, and a light chain having an amino acid sequence having at least 95% identity to an amino acid sequence of SEQ ID NO:4148.

[0239] In one aspect, provided herein is an antibody that binds TRGDC, comprising: (i) a VH comprising a VH CDR1, a VH CDR2, and a VH CDR3 having an amino acid sequence of SEQ ID NOs:4149, 4150, and 4151, respectively, and (ii) a VL comprising a VL CDR1, VL CDR2, and VL CDR3 having an amino acid sequence of SEQ ID NOs:4152, 4153, and 4154, respectively. In one aspect, provided herein is an antibody that binds TRGDC, comprising: (i) a VH comprising a VH CDR1, a VH CDR2, and a VH CDR3 having an amino acid sequence of SEQ ID NOs:4155, 4156, and 4157, respectively, and (ii) a VL comprising a VL CDR1, VL CDR2, and VL CDR3 having an amino acid sequence of SEQ ID NOs:4158, 4159, and 4160, respectively. In one aspect, provided herein is an antibody that binds TRGDC, comprising: (i) a VH comprising a VH CDR1, a VH CDR2, and a VH CDR3 having an amino acid sequence of SEQ ID NOs:4161, 4162, and 4163, respectively, and (ii) a VL comprising a VL CDR1, VL CDR2, and VL CDR3 having an amino acid sequence of SEQ ID NOs:4164, 4165, and 4166, respectively. In one aspect, provided herein is an antibody that binds TRGDC, comprising: (i) a VH comprising a VH CDR1, a VH CDR2, and a VH CDR3 having an amino acid sequence of SEQ ID NOs:4167, 4168, and 4169, respectively, and (ii) a VL comprising a VL CDR1, VL CDR2, and VL CDR3 having an amino acid sequence of SEQ ID NOs:4170, 4171, and 4172, respectively. In one aspect, provided herein is an antibody that binds TRGDC, comprising: (i) a VH comprising a VH CDR1, a VH CDR2, and a VH CDR3 having an amino acid sequence of SEQ ID NOs:4173, 4174, and 4175, respectively, and (ii) a VL comprising a VL CDR1, VL CDR2, and VL CDR3 having an amino acid sequence of SEQ ID NOs:4176, 4177, and 4178, respectively. In one aspect, provided herein is an antibody that binds TRGDC, comprising: (i) a VH comprising a VH CDR1, a VH CDR2, and a VH CDR3 having an amino acid sequence of a VH CDR1, a VH CDR2, and a VH CDR3, respectively, of a VH having an amino acid sequence of SEQ ID NO:4179; and (ii) a VL comprising a VL CDR1, a VL CDR2, and a VL CDR3 having an amino acid sequence of a VL CDR1, a VL CDR2, and a VL CDR3, respectively, of SEQ ID NO:4180. In one aspect, provided herein is an antibody that binds TRGDC, comprising a VH having an amino acid sequence of SEQ ID NO:4179. In one aspect, provided herein is an antibody that binds TRGDC, comprising a VL having an amino acid sequence of SEQ ID NO:4180. In one aspect, provided herein is an antibody that binds TRGDC, comprising a VH having an amino acid sequence of SEQ ID NO:4179, and a VL having an amino acid sequence of SEQ ID NO:4180. In one aspect, provided herein is an antibody that binds TRGDC, comprising a heavy chain having an amino acid sequence of SEQ ID NO:4181. In one aspect, provided herein is an antibody that binds TRGDC, comprising a light chain having an amino acid sequence of SEQ ID NO:4182. In one aspect, provided herein is an antibody that binds TRGDC, comprising a heavy chain having an amino acid sequence of SEQ ID NO:4181, and a light chain having an amino acid sequence of SEQ ID NO:4182. In one aspect, provided herein is an antibody that binds TRGDC, comprising a VH having an amino acid sequence having at least 95% identity to an amino acid sequence of SEQ ID NO:4179. In one aspect, provided herein is an antibody that binds TRGDC, comprising a VL having an amino acid sequence having at least 95% identity to an amino acid sequence of SEQ ID NO:4180. In one aspect, provided herein is an antibody that binds TRGDC, comprising a VH having an amino acid sequence having at least 95% identity to an amino acid sequence of SEQ ID NO:4179, and a VL having an amino acid sequence having at least 95% identity to an amino acid sequence of SEQ ID NO:4180. In one aspect, provided herein is an antibody that binds TRGDC, comprising a heavy chain having an amino acid sequence having at least 95% identity to an amino acid sequence of SEQ ID NO:4181. In one aspect, provided herein is an antibody that binds TRGDC, comprising a light chain having an amino acid sequence having at least 95% identity to an amino acid sequence of SEQ ID NO:4182. In one aspect, provided herein is an antibody that binds TRGDC, comprising a heavy chain having an amino acid sequence having at least 95% identity to an amino acid sequence of SEQ ID NO:4181, and a light chain having an amino acid sequence having at least 95% identity to an amino acid sequence of SEQ ID NO:4182.

[0240] In one aspect, provided herein is an antibody that binds TRGDC, comprising: (i) a VH comprising a VH CDR1, a VH CDR2, and a VH CDR3 having an amino acid sequence of SEQ ID NOs:4183, 4184, and 4185, respectively, and (ii) a VL comprising a VL CDR1, VL CDR2, and VL CDR3 having an amino acid sequence of SEQ ID NOs:4186, 4187, and 4188, respectively. In one aspect, provided herein is an antibody that binds TRGDC, comprising: (i) a VH comprising a VH CDR1, a VH CDR2, and a VH CDR3 having an amino acid sequence of SEQ ID NOs:4189, 4190, and 4191, respectively, and (ii) a VL comprising a VL CDR1, VL CDR2, and VL CDR3 having an amino acid sequence of SEQ ID NOs:4192, 4193, and 4194, respectively. In one aspect, provided herein is an antibody that binds TRGDC, comprising: (i) a VH comprising a VH CDR1, a VH CDR2, and a VH CDR3 having an amino acid sequence of SEQ ID NOs:4195, 4196, and 4197, respectively, and (ii) a VL comprising a VL CDR1, VL CDR2, and VL CDR3 having an amino acid sequence of SEQ ID NOs:4198, 4199, and 4200, respectively. In one aspect, provided herein is an antibody that binds TRGDC, comprising: (i) a VH comprising a VH CDR1, a VH CDR2, and a VH CDR3 having an amino acid sequence of SEQ ID NOs:4201, 4202, and 4203, respectively, and (ii) a VL comprising a VL CDR1, VL CDR2, and VL CDR3 having an amino acid sequence of SEQ ID NOs:4204, 4205, and 4206, respectively. In one aspect, provided herein is an antibody that binds TRGDC, comprising: (i) a VH comprising a VH CDR1, a VH CDR2, and a VH CDR3 having an amino acid sequence of SEQ ID NOs:4207, 4208, and 4209, respectively, and (ii) a VL comprising a VL CDR1, VL CDR2, and VL CDR3 having an amino acid sequence of SEQ ID NOs:4210, 4211, and 4212, respectively. In one aspect, provided herein is an antibody that binds TRGDC, comprising: (i) a VH comprising a VH CDR1, a VH CDR2, and a VH CDR3 having an amino acid sequence of a VH CDR1, a VH CDR2, and a VH CDR3, respectively, of a VH having an amino acid sequence of SEQ ID NO:4213; and (ii) a VL comprising a VL CDR1, a VL CDR2, and a VL CDR3 having an amino acid sequence of a VL CDR1, a VL CDR2, and a VL CDR3, respectively, of SEQ ID NO:4214. In one aspect, provided herein is an antibody that binds TRGDC, comprising a VH having an amino acid sequence of SEQ ID NO:4213. In one aspect, provided herein is an antibody that binds TRGDC, comprising a VL having an amino acid sequence of SEQ ID NO:4214. In one aspect, provided herein is an antibody that binds TRGDC, comprising a VH having an amino acid sequence of SEQ ID NO:4213, and a VL having an amino acid sequence of SEQ ID NO:4214. In one aspect, provided herein is an antibody that binds TRGDC, comprising a heavy chain having an amino acid sequence of SEQ ID NO:4215. In one aspect, provided herein is an antibody that binds TRGDC, comprising a light chain having an amino acid sequence of SEQ ID NO:4216. In one aspect, provided herein is an antibody that binds TRGDC, comprising a heavy chain having an amino acid sequence of SEQ ID NO:4215, and a light chain having an amino acid sequence of SEQ ID NO:4216. In one aspect, provided herein is an antibody that binds TRGDC, comprising a VH having an amino acid sequence having at least 95% identity to an amino acid sequence of SEQ ID NO:4213. In one aspect, provided herein is an antibody that binds TRGDC, comprising a VL having an amino acid sequence having at least 95% identity to an amino acid sequence of SEQ ID NO:4214. In one aspect, provided herein is an antibody that binds TRGDC, comprising a VH having an amino acid sequence having at least 95% identity to an amino acid sequence of SEQ ID NO:4213, and a VL having an amino acid sequence having at least 95% identity to an amino acid sequence of SEQ ID NO:4214. In one aspect, provided herein is an antibody that binds TRGDC, comprising a heavy chain having an amino acid sequence having at least 95% identity to an amino acid sequence of SEQ ID NO:4215. In one aspect, provided herein is an antibody that binds TRGDC, comprising a light chain having an amino acid sequence having at least 95% identity to an amino acid sequence of SEQ ID NO:4216. In one aspect, provided herein is an antibody that binds TRGDC, comprising a heavy chain having an amino acid sequence having at least 95% identity to an amino acid sequence of SEQ ID NO:4215, and a light chain having an amino acid sequence having at least 95% identity to an amino acid sequence of SEQ ID NO:4216.

[0241] In one aspect, provided herein is an antibody that binds TRGDC, comprising: (i) a VH comprising a VH CDR1, a VH CDR2, and a VH CDR3 having an amino acid sequence of SEQ ID NOs:4217, 4218, and 4219, respectively, and (ii) a VL comprising a VL CDR1, VL CDR2, and VL CDR3 having an amino acid sequence of SEQ ID NOs:4220, 4221, and 4222, respectively. In one aspect, provided herein is an antibody that binds TRGDC, comprising: (i) a VH comprising a VH CDR1, a VH CDR2, and a VH CDR3 having an amino acid sequence of SEQ ID NOs:4223, 4224, and 4225, respectively, and (ii) a VL comprising a VL CDR1, VL CDR2, and VL CDR3 having an amino acid sequence of SEQ ID NOs:4226, 4227, and 4228, respectively. In one aspect, provided herein is an antibody that binds TRGDC, comprising: (i) a VH comprising a VH CDR1, a VH CDR2, and a VH CDR3 having an amino acid sequence of SEQ ID NOs:4229, 4230, and 4231, respectively, and (ii) a VL comprising a VL CDR1, VL CDR2, and VL CDR3 having an amino acid sequence of SEQ ID NOs:4232, 4233, and 4234, respectively. In one aspect, provided herein is an antibody that binds TRGDC, comprising: (i) a VH comprising a VH CDR1, a VH CDR2, and a VH CDR3 having an amino acid sequence of SEQ ID NOs:4235, 4236, and 4237, respectively, and (ii) a VL comprising a VL CDR1, VL CDR2, and VL CDR3 having an amino acid sequence of SEQ ID NOs:4238, 4239, and 4240, respectively. In one aspect, provided herein is an antibody that binds TRGDC, comprising: (i) a VH comprising a VH CDR1, a VH CDR2, and a VH CDR3 having an amino acid sequence of SEQ ID NOs:4241, 4242, and 4243, respectively, and (ii) a VL comprising a VL CDR1, VL CDR2, and VL CDR3 having an amino acid sequence of SEQ ID NOs:4244, 4245, and 4246, respectively. In one aspect, provided herein is an antibody that binds TRGDC, comprising: (i) a VH comprising a VH CDR1, a VH CDR2, and a VH CDR3 having an amino acid sequence of a VH CDR1, a VH CDR2, and a VH CDR3, respectively, of a VH having an amino acid sequence of SEQ ID NO:4247; and (ii) a VL comprising a VL CDR1, a VL CDR2, and a VL CDR3 having an amino acid sequence of a VL CDR1, a VL CDR2, and a VL CDR3, respectively, of SEQ ID NO:4248. In one aspect, provided herein is an antibody that binds TRGDC, comprising a VH having an amino acid sequence of SEQ ID NO:4247. In one aspect, provided herein is an antibody that binds TRGDC, comprising a VL having an amino acid sequence of SEQ ID NO:4248. In one aspect, provided herein is an antibody that binds TRGDC, comprising a VH having an amino acid sequence of SEQ ID NO:4247, and a VL having an amino acid sequence of SEQ ID NO:4248. In one aspect, provided herein is an antibody that binds TRGDC, comprising a heavy chain having an amino acid sequence of SEQ ID NO:4249. In one aspect, provided herein is an antibody that binds TRGDC, comprising a light chain having an amino acid sequence of SEQ ID NO:4250. In one aspect, provided herein is an antibody that binds TRGDC, comprising a heavy chain having an amino acid sequence of SEQ ID NO:4249, and a light chain having an amino acid sequence of SEQ ID NO:4250. In one aspect, provided herein is an antibody that binds TRGDC, comprising a VH having an amino acid sequence having at least 95% identity to an amino acid sequence of SEQ ID NO:4247. In one aspect, provided herein is an antibody that binds TRGDC, comprising a VL having an amino acid sequence having at least 95% identity to an amino acid sequence of SEQ ID NO:4248. In one aspect, provided herein is an antibody that binds TRGDC, comprising a VH having an amino acid sequence having at least 95% identity to an amino acid sequence of SEQ ID NO:4247, and a VL having an amino acid sequence having at least 95% identity to an amino acid sequence of SEQ ID NO:4248. In one aspect, provided herein is an antibody that binds TRGDC, comprising a heavy chain having an amino acid sequence having at least 95% identity to an amino acid sequence of SEQ ID NO:4249. In one aspect, provided herein is an antibody that binds TRGDC, comprising a light chain having an amino acid sequence having at least 95% identity to an amino acid sequence of SEQ ID NO:4250. In one aspect, provided herein is an antibody that binds TRGDC, comprising a heavy chain having an amino acid sequence having at least 95% identity to an amino acid sequence of SEQ ID NO:4249, and a light chain having an amino acid sequence having at least 95% identity to an amino acid sequence of SEQ ID NO:4250.

[0242] In one aspect, provided herein is an antibody that binds TRGDC, comprising: (i) a VH comprising a VH CDR1, a VH CDR2, and a VH CDR3 having an amino acid sequence of SEQ ID NOs:4251, 4252, and 4253, respectively, and (ii) a VL comprising a VL CDR1, VL CDR2, and VL CDR3 having an amino acid sequence of SEQ ID NOs:4254, 4255, and 4256, respectively. In one aspect, provided herein is an antibody that binds TRGDC, comprising: (i) a VH comprising a VH CDR1, a VH CDR2, and a VH CDR3 having an amino acid sequence of SEQ ID NOs:4257, 4258, and 4259, respectively, and (ii) a VL comprising a VL CDR1, VL CDR2, and VL CDR3 having an amino acid sequence of SEQ ID NOs:4260, 4261, and 4262, respectively. In one aspect, provided herein is an antibody that binds TRGDC, comprising: (i) a VH comprising a VH CDR1, a VH CDR2, and a VH CDR3 having an amino acid sequence of SEQ ID NOs:4263, 4264, and 4265, respectively, and (ii) a VL comprising a VL CDR1, VL CDR2, and VL CDR3 having an amino acid sequence of SEQ ID NOs:4266, 4267, and 4268, respectively. In one aspect, provided herein is an antibody that binds TRGDC, comprising: (i) a VH comprising a VH CDR1, a VH CDR2, and a VH CDR3 having an amino acid sequence of SEQ ID NOs:4269, 4270, and 4271, respectively, and (ii) a VL comprising a VL CDR1, VL CDR2, and VL CDR3 having an amino acid sequence of SEQ ID NOs:4272, 4273, and 4274, respectively. In one aspect, provided herein is an antibody that binds TRGDC, comprising: (i) a VH comprising a VH CDR1, a VH CDR2, and a VH CDR3 having an amino acid sequence of SEQ ID NOs:4275, 4276, and 4277, respectively, and (ii) a VL comprising a VL CDR1, VL CDR2, and VL CDR3 having an amino acid sequence of SEQ ID NOs:4278, 4279, and 4280, respectively. In one aspect, provided herein is an antibody that binds TRGDC, comprising: (i) a VH comprising a VH CDR1, a VH CDR2, and a VH CDR3 having an amino acid sequence of a VH CDR1, a VH CDR2, and a VH CDR3, respectively, of a VH having an amino acid sequence of SEQ ID NO:4281; and (ii) a VL comprising a VL CDR1, a VL CDR2, and a VL CDR3 having an amino acid sequence of a VL CDR1, a VL CDR2, and a VL CDR3, respectively, of SEQ ID NO:4282. In one aspect, provided herein is an antibody that binds TRGDC, comprising a VH having an amino acid sequence of SEQ ID NO:4281. In one aspect, provided herein is an antibody that binds TRGDC, comprising a VL having an amino acid sequence of SEQ ID NO:4282. In one aspect, provided herein is an antibody that binds TRGDC, comprising a VH having an amino acid sequence of SEQ ID NO:4281, and a VL having an amino acid sequence of SEQ ID NO:4282. In one aspect, provided herein is an antibody that binds TRGDC, comprising a heavy chain having an amino acid sequence of SEQ ID NO:4283. In one aspect, provided herein is an antibody that binds TRGDC, comprising a light chain having an amino acid sequence of SEQ ID NO:4284. In one aspect, provided herein is an antibody that binds TRGDC, comprising a heavy chain having an amino acid sequence of SEQ ID NO:4283, and a light chain having an amino acid sequence of SEQ ID NO:4284. In one aspect, provided herein is an antibody that binds TRGDC, comprising a VH having an amino acid sequence having at least 95% identity to an amino acid sequence of SEQ ID NO:4281. In one aspect, provided herein is an antibody that binds TRGDC, comprising a VL having an amino acid sequence having at least 95% identity to an amino acid sequence of SEQ ID NO:4282. In one aspect, provided herein is an antibody that binds TRGDC, comprising a VH having an amino acid sequence having at least 95% identity to an amino acid sequence of SEQ ID NO:4281, and a VL having an amino acid sequence having at least 95% identity to an amino acid sequence of SEQ ID NO:4282. In one aspect, provided herein is an antibody that binds TRGDC, comprising a heavy chain having an amino acid sequence having at least 95% identity to an amino acid sequence of SEQ ID NO:4283. In one aspect, provided herein is an antibody that binds TRGDC, comprising a light chain having an amino acid sequence having at least 95% identity to an amino acid sequence of SEQ ID NO:4284. In one aspect, provided herein is an antibody that binds TRGDC, comprising a heavy chain having an amino acid sequence having at least 95% identity to an amino acid sequence of SEQ ID NO:4283, and a light chain having an amino acid sequence having at least 95% identity to an amino acid sequence of SEQ ID NO:4284.

[0243] In one aspect, provided herein is an antibody that binds TRGDC, comprising: (i) a VH comprising a VH CDR1, a VH CDR2, and a VH CDR3 having an amino acid sequence of SEQ ID NOs:4285, 4286, and 4287, respectively, and (ii) a VL comprising a VL CDR1, VL CDR2, and VL CDR3 having an amino acid sequence of SEQ ID NOs:4288, 4289, and 4290, respectively. In one aspect, provided herein is an antibody that binds TRGDC, comprising: (i) a VH comprising a VH CDR1, a VH CDR2, and a VH CDR3 having an amino acid sequence of SEQ ID NOs:4291, 4292, and 4293, respectively, and (ii) a VL comprising a VL CDR1, VL CDR2, and VL CDR3 having an amino acid sequence of SEQ ID NOs:4294, 4295, and 4296, respectively. In one aspect, provided herein is an antibody that binds TRGDC, comprising: (i) a VH comprising a VH CDR1, a VH CDR2, and a VH CDR3 having an amino acid sequence of SEQ ID NOs:4297, 4298, and 4299, respectively, and (ii) a VL comprising a VL CDR1, VL CDR2, and VL CDR3 having an amino acid sequence of SEQ ID NOs:4300, 4301, and 4302, respectively. In one aspect, provided herein is an antibody that binds TRGDC, comprising: (i) a VH comprising a VH CDR1, a VH CDR2, and a VH CDR3 having an amino acid sequence of SEQ ID NOs:4303, 4304, and 4305, respectively, and (ii) a VL comprising a VL CDR1, VL CDR2, and VL CDR3 having an amino acid sequence of SEQ ID NOs:4306, 4307, and 4308, respectively. In one aspect, provided herein is an antibody that binds TRGDC, comprising: (i) a VH comprising a VH CDR1, a VH CDR2, and a VH CDR3 having an amino acid sequence of SEQ ID NOs:4309, 4310, and 4311, respectively, and (ii) a VL comprising a VL CDR1, VL CDR2, and VL CDR3 having an amino acid sequence of SEQ ID NOs:4312, 4313, and 4314, respectively. In one aspect, provided herein is an antibody that binds TRGDC, comprising: (i) a VH comprising a VH CDR1, a VH CDR2, and a VH CDR3 having an amino acid sequence of a VH CDR1, a VH CDR2, and a VH CDR3, respectively, of a VH having an amino acid sequence of SEQ ID NO:4315; and (ii) a VL comprising a VL CDR1, a VL CDR2, and a VL CDR3 having an amino acid sequence of a VL CDR1, a VL CDR2, and a VL CDR3, respectively, of SEQ ID NO:4316. In one aspect, provided herein is an antibody that binds TRGDC, comprising a VH having an amino acid sequence of SEQ ID NO:4315. In one aspect, provided herein is an antibody that binds TRGDC, comprising a VL having an amino acid sequence of SEQ ID NO:4316. In one aspect, provided herein is an antibody that binds TRGDC, comprising a VH having an amino acid sequence of SEQ ID NO:4315, and a VL having an amino acid sequence of SEQ ID NO:4316. In one aspect, provided herein is an antibody that binds TRGDC, comprising a heavy chain having an amino acid sequence of SEQ ID NO:4317. In one aspect, provided herein is an antibody that binds TRGDC, comprising a light chain having an amino acid sequence of SEQ ID NO:4318. In one aspect, provided herein is an antibody that binds TRGDC, comprising a heavy chain having an amino acid sequence of SEQ ID NO:4317, and a light chain having an amino acid sequence of SEQ ID NO:4318. In one aspect, provided herein is an antibody that binds TRGDC, comprising a VH having an amino acid sequence having at least 95% identity to an amino acid sequence of SEQ ID NO:4315. In one aspect, provided herein is an antibody that binds TRGDC, comprising a VL having an amino acid sequence having at least 95% identity to an amino acid sequence of SEQ ID NO:4316. In one aspect, provided herein is an antibody that binds TRGDC, comprising a VH having an amino acid sequence having at least 95% identity to an amino acid sequence of SEQ ID NO:4315, and a VL having an amino acid sequence having at least 95% identity to an amino acid sequence of SEQ ID NO:4316. In one aspect, provided herein is an antibody that binds TRGDC, comprising a heavy chain having an amino acid sequence having at least 95% identity to an amino acid sequence of SEQ ID NO:4317. In one aspect, provided herein is an antibody that binds TRGDC, comprising a light chain having an amino acid sequence having at least 95% identity to an amino acid sequence of SEQ ID NO:4318. In one aspect, provided herein is an antibody that binds TRGDC, comprising a heavy chain having an amino acid sequence having at least 95% identity to an amino acid sequence of SEQ ID NO:4317, and a light chain having an amino acid sequence having at least 95% identity to an amino acid sequence of SEQ ID NO:4318.

[0244] In one aspect, provided herein is an antibody that binds TRGDC, comprising: (i) a VH comprising a VH CDR1, a VH CDR2, and a VH CDR3 having an amino acid sequence of SEQ ID NOs:4319, 4320, and 4321, respectively, and (ii) a VL comprising a VL CDR1, VL CDR2, and VL CDR3 having an amino acid sequence of SEQ ID NOs:4322, 4323, and 4324, respectively. In one aspect, provided herein is an antibody that binds TRGDC, comprising: (i) a VH comprising a VH CDR1, a VH CDR2, and a VH CDR3 having an amino acid sequence of SEQ ID NOs:4325, 4326, and 4327, respectively, and (ii) a VL comprising a VL CDR1, VL CDR2, and VL CDR3 having an amino acid sequence of SEQ ID NOs:4328, 4329, and 4330, respectively. In one aspect, provided herein is an antibody that binds TRGDC, comprising: (i) a VH comprising a VH CDR1, a VH CDR2, and a VH CDR3 having an amino acid sequence of SEQ ID NOs:4331, 4332, and 4333, respectively, and (ii) a VL comprising a VL CDR1, VL CDR2, and VL CDR3 having an amino acid sequence of SEQ ID NOs:4334, 4335, and 4336, respectively. In one aspect, provided herein is an antibody that binds TRGDC, comprising: (i) a VH comprising a VH CDR1, a VH CDR2, and a VH CDR3 having an amino acid sequence of SEQ ID NOs:4337, 4338, and 4339, respectively, and (ii) a VL comprising a VL CDR1, VL CDR2, and VL CDR3 having an amino acid sequence of SEQ ID NOs:4340, 4341, and 4342, respectively. In one aspect, provided herein is an antibody that binds TRGDC, comprising: (i) a VH comprising a VH CDR1, a VH CDR2, and a VH CDR3 having an amino acid sequence of SEQ ID NOs:4343, 4344, and 4345, respectively, and (ii) a VL comprising a VL CDR1, VL CDR2, and VL CDR3 having an amino acid sequence of SEQ ID NOs:4346, 4347, and 4348, respectively. In one aspect, provided herein is an antibody that binds TRGDC, comprising: (i) a VH comprising a VH CDR1, a VH CDR2, and a VH CDR3 having an amino acid sequence of a VH CDR1, a VH CDR2, and a VH CDR3, respectively, of a VH having an amino acid sequence of SEQ ID NO:4349; and (ii) a VL comprising a VL CDR1, a VL CDR2, and a VL CDR3 having an amino acid sequence of a VL CDR1, a VL CDR2, and a VL CDR3, respectively, of SEQ ID NO:4350. In one aspect, provided herein is an antibody that binds TRGDC, comprising a VH having an amino acid sequence of SEQ ID NO:4349. In one aspect, provided herein is an antibody that binds TRGDC, comprising a VL having an amino acid sequence of SEQ ID NO:4350. In one aspect, provided herein is an antibody that binds TRGDC, comprising a VH having an amino acid sequence of SEQ ID NO:4349, and a VL having an amino acid sequence of SEQ ID NO:4350. In one aspect, provided herein is an antibody that binds TRGDC, comprising a heavy chain having an amino acid sequence of SEQ ID NO:4351. In one aspect, provided herein is an antibody that binds TRGDC, comprising a light chain having an amino acid sequence of SEQ ID NO:4352. In one aspect, provided herein is an antibody that binds TRGDC, comprising a heavy chain having an amino acid sequence of SEQ ID NO:4351, and a light chain having an amino acid sequence of SEQ ID NO:4352. In one aspect, provided herein is an antibody that binds TRGDC, comprising a VH having an amino acid sequence having at least 95% identity to an amino acid sequence of SEQ ID NO:4349. In one aspect, provided herein is an antibody that binds TRGDC, comprising a VL having an amino acid sequence having at least 95% identity to an amino acid sequence of SEQ ID NO:4350. In one aspect, provided herein is an antibody that binds TRGDC, comprising a VH having an amino acid sequence having at least 95% identity to an amino acid sequence of SEQ ID NO:4349, and a VL having an amino acid sequence having at least 95% identity to an amino acid sequence of SEQ ID NO:4350. In one aspect, provided herein is an antibody that binds TRGDC, comprising a heavy chain having an amino acid sequence having at least 95% identity to an amino acid sequence of SEQ ID NO:4351. In one aspect, provided herein is an antibody that binds TRGDC, comprising a light chain having an amino acid sequence having at least 95% identity to an amino acid sequence of SEQ ID NO:4352. In one aspect, provided herein is an antibody that binds TRGDC, comprising a heavy chain having an amino acid sequence having at least 95% identity to an amino acid sequence of SEQ ID NO:4351, and a light chain having an amino acid sequence having at least 95% identity to an amino acid sequence of SEQ ID NO:4352.

[0245] In one aspect, provided herein is an antibody that binds TRGDC, comprising: (i) a VH comprising a VH CDR1, a VH CDR2, and a VH CDR3 having an amino acid sequence of SEQ ID NOs:4353, 4354, and 4355, respectively, and (ii) a VL comprising a VL CDR1, VL CDR2, and VL CDR3 having an amino acid sequence of SEQ ID NOs:4356, 4357, and 4358, respectively. In one aspect, provided herein is an antibody that binds TRGDC, comprising: (i) a VH comprising a VH CDR1, a VH CDR2, and a VH CDR3 having an amino acid sequence of SEQ ID NOs:4359, 4360, and 4361, respectively, and (ii) a VL comprising a VL CDR1, VL CDR2, and VL CDR3 having an amino acid sequence of SEQ ID NOs:4362, 4363, and 4364, respectively. In one aspect, provided herein is an antibody that binds TRGDC, comprising: (i) a VH comprising a VH CDR1, a VH CDR2, and a VH CDR3 having an amino acid sequence of SEQ ID NOs:4365, 4366, and 4367, respectively, and (ii) a VL comprising a VL CDR1, VL CDR2, and VL CDR3 having an amino acid sequence of SEQ ID NOs:4368, 4369, and 4370, respectively. In one aspect, provided herein is an antibody that binds TRGDC, comprising: (i) a VH comprising a VH CDR1, a VH CDR2, and a VH CDR3 having an amino acid sequence of SEQ ID NOs:4371, 4372, and 4373, respectively, and (ii) a VL comprising a VL CDR1, VL CDR2, and VL CDR3 having an amino acid sequence of SEQ ID NOs:4374, 4375, and 4376, respectively. In one aspect, provided herein is an antibody that binds TRGDC, comprising: (i) a VH comprising a VH CDR1, a VH CDR2, and a VH CDR3 having an amino acid sequence of SEQ ID NOs:4377, 4378, and 4379, respectively, and (ii) a VL comprising a VL CDR1, VL CDR2, and VL CDR3 having an amino acid sequence of SEQ ID NOs:4380, 4381, and 4382, respectively. In one aspect, provided herein is an antibody that binds TRGDC, comprising: (i) a VH comprising a VH CDR1, a VH CDR2, and a VH CDR3 having an amino acid sequence of a VH CDR1, a VH CDR2, and a VH CDR3, respectively, of a VH having an amino acid sequence of SEQ ID NO:4383; and (ii) a VL comprising a VL CDR1, a VL CDR2, and a VL CDR3 having an amino acid sequence of a VL CDR1, a VL CDR2, and a VL CDR3, respectively, of SEQ ID NO:4384. In one aspect, provided herein is an antibody that binds TRGDC, comprising a VH having an amino acid sequence of SEQ ID NO:4383. In one aspect, provided herein is an antibody that binds TRGDC, comprising a VL having an amino acid sequence of SEQ ID NO:4384. In one aspect, provided herein is an antibody that binds TRGDC, comprising a VH having an amino acid sequence of SEQ ID NO:4383, and a VL having an amino acid sequence of SEQ ID NO:4384. In one aspect, provided herein is an antibody that binds TRGDC, comprising a heavy chain having an amino acid sequence of SEQ ID NO:4385. In one aspect, provided herein is an antibody that binds TRGDC, comprising a light chain having an amino acid sequence of SEQ ID NO:4386. In one aspect, provided herein is an antibody that binds TRGDC, comprising a heavy chain having an amino acid sequence of SEQ ID NO:4385, and a light chain having an amino acid sequence of SEQ ID NO:4386. In one aspect, provided herein is an antibody that binds TRGDC, comprising a VH having an amino acid sequence having at least 95% identity to an amino acid sequence of SEQ ID NO:4383. In one aspect, provided herein is an antibody that binds TRGDC, comprising a VL having an amino acid sequence having at least 95% identity to an amino acid sequence of SEQ ID NO:4384. In one aspect, provided herein is an antibody that binds TRGDC, comprising a VH having an amino acid sequence having at least 95% identity to an amino acid sequence of SEQ ID NO:4383, and a VL having an amino acid sequence having at least 95% identity to an amino acid sequence of SEQ ID NO:4384. In one aspect, provided herein is an antibody that binds TRGDC, comprising a heavy chain having an amino acid sequence having at least 95% identity to an amino acid sequence of SEQ ID NO:4385. In one aspect, provided herein is an antibody that binds TRGDC, comprising a light chain having an amino acid sequence having at least 95% identity to an amino acid sequence of SEQ ID NO:4386. In one aspect, provided herein is an antibody that binds TRGDC, comprising a heavy chain having an amino acid sequence having at least 95% identity to an amino acid sequence of SEQ ID NO:4385, and a light chain having an amino acid sequence having at least 95% identity to an amino acid sequence of SEQ ID NO:4386.

[0246] In one aspect, provided herein is an antibody that binds TRGDC, comprising: (i) a VH comprising a VH CDR1, a VH CDR2, and a VH CDR3 having an amino acid sequence of SEQ ID NOs:4387, 4388, and 4389, respectively, and (ii) a VL comprising a VL CDR1, VL CDR2, and VL CDR3 having an amino acid sequence of SEQ ID NOs:4390, 4391, and 4392, respectively. In one aspect, provided herein is an antibody that binds TRGDC, comprising: (i) a VH comprising a VH CDR1, a VH CDR2, and a VH CDR3 having an amino acid sequence of SEQ ID NOs:4393, 4394, and 4395, respectively, and (ii) a VL comprising a VL CDR1, VL CDR2, and VL CDR3 having an amino acid sequence of SEQ ID NOs:4396, 4397, and 4398, respectively. In one aspect, provided herein is an antibody that binds TRGDC, comprising: (i) a VH comprising a VH CDR1, a VH CDR2, and a VH CDR3 having an amino acid sequence of SEQ ID NOs:4399, 4400, and 4401, respectively, and (ii) a VL comprising a VL CDR1, VL CDR2, and VL CDR3 having an amino acid sequence of SEQ ID NOs:4402, 4403, and 4404, respectively. In one aspect, provided herein is an antibody that binds TRGDC, comprising: (i) a VH comprising a VH CDR1, a VH CDR2, and a VH CDR3 having an amino acid sequence of SEQ ID NOs:4405, 4406, and 4407, respectively, and (ii) a VL comprising a VL CDR1, VL CDR2, and VL CDR3 having an amino acid sequence of SEQ ID NOs:4408, 4409, and 4410, respectively. In one aspect, provided herein is an antibody that binds TRGDC, comprising: (i) a VH comprising a VH CDR1, a VH CDR2, and a VH CDR3 having an amino acid sequence of SEQ ID NOs:4411, 4412, and 4413, respectively, and (ii) a VL comprising a VL CDR1, VL CDR2, and VL CDR3 having an amino acid sequence of SEQ ID NOs:4414, 4415, and 4416, respectively. In one aspect, provided herein is an antibody that binds TRGDC, comprising: (i) a VH comprising a VH CDR1, a VH CDR2, and a VH CDR3 having an amino acid sequence of a VH CDR1, a VH CDR2, and a VH CDR3, respectively, of a VH having an amino acid sequence of SEQ ID NO:4417; and (ii) a VL comprising a VL CDR1, a VL CDR2, and a VL CDR3 having an amino acid sequence of a VL CDR1, a VL CDR2, and a VL CDR3, respectively, of SEQ ID NO:4418. In one aspect, provided herein is an antibody that binds TRGDC, comprising a VH having an amino acid sequence of SEQ ID NO:4417. In one aspect, provided herein is an antibody that binds TRGDC, comprising a VL having an amino acid sequence of SEQ ID NO:4418. In one aspect, provided herein is an antibody that binds TRGDC, comprising a VH having an amino acid sequence of SEQ ID NO:4417, and a VL having an amino acid sequence of SEQ ID NO:4418. In one aspect, provided herein is an antibody that binds TRGDC, comprising a heavy chain having an amino acid sequence of SEQ ID NO:4419. In one aspect, provided herein is an antibody that binds TRGDC, comprising a light chain having an amino acid sequence of SEQ ID NO:4420. In one aspect, provided herein is an antibody that binds TRGDC, comprising a heavy chain having an amino acid sequence of SEQ ID NO:4419, and a light chain having an amino acid sequence of SEQ ID NO:4420. In one aspect, provided herein is an antibody that binds TRGDC, comprising a VH having an amino acid sequence having at least 95% identity to an amino acid sequence of SEQ ID NO:4417. In one aspect, provided herein is an antibody that binds TRGDC, comprising a VL having an amino acid sequence having at least 95% identity to an amino acid sequence of SEQ ID NO:4418. In one aspect, provided herein is an antibody that binds TRGDC, comprising a VH having an amino acid sequence having at least 95% identity to an amino acid sequence of SEQ ID NO:4417, and a VL having an amino acid sequence having at least 95% identity to an amino acid sequence of SEQ ID NO:4418. In one aspect, provided herein is an antibody that binds TRGDC, comprising a heavy chain having an amino acid sequence having at least 95% identity to an amino acid sequence of SEQ ID NO:4419. In one aspect, provided herein is an antibody that binds TRGDC, comprising a light chain having an amino acid sequence having at least 95% identity to an amino acid sequence of SEQ ID NO:4420. In one aspect, provided herein is an antibody that binds TRGDC, comprising a heavy chain having an amino acid sequence having at least 95% identity to an amino acid sequence of SEQ ID NO:4419, and a light chain having an amino acid sequence having at least 95% identity to an amino acid sequence of SEQ ID NO:4420.

[0247] In one aspect, provided herein is an antibody that binds TRGDC, comprising: (i) a VH comprising a VH CDR1, a VH CDR2, and a VH CDR3 having an amino acid sequence of SEQ ID NOs:4421, 4422, and 4423, respectively, and (ii) a VL comprising a VL CDR1, VL CDR2, and VL CDR3 having an amino acid sequence of SEQ ID NOs:4424, 4425, and 4426, respectively. In one aspect, provided herein is an antibody that binds TRGDC, comprising: (i) a VH comprising a VH CDR1, a VH CDR2, and a VH CDR3 having an amino acid sequence of SEQ ID NOs:4427, 4428, and 4429, respectively, and (ii) a VL comprising a VL CDR1, VL CDR2, and VL CDR3 having an amino acid sequence of SEQ ID NOs:4430, 4431, and 4432, respectively. In one aspect, provided herein is an antibody that binds TRGDC, comprising: (i) a VH comprising a VH CDR1, a VH CDR2, and a VH CDR3 having an amino acid sequence of SEQ ID NOs:4433, 4434, and 4435, respectively, and (ii) a VL comprising a VL CDR1, VL CDR2, and VL CDR3 having an amino acid sequence of SEQ ID NOs:4436, 4437, and 4438, respectively. In one aspect, provided herein is an antibody that binds TRGDC, comprising: (i) a VH comprising a VH CDR1, a VH CDR2, and a VH CDR3 having an amino acid sequence of SEQ ID NOs:4439, 4440, and 4441, respectively, and (ii) a VL comprising a VL CDR1, VL CDR2, and VL CDR3 having an amino acid sequence of SEQ ID NOs:4442, 4443, and 4444, respectively. In one aspect, provided herein is an antibody that binds TRGDC, comprising: (i) a VH comprising a VH CDR1, a VH CDR2, and a VH CDR3 having an amino acid sequence of SEQ ID NOs:4445, 4446, and 4447, respectively, and (ii) a VL comprising a VL CDR1, VL CDR2, and VL CDR3 having an amino acid sequence of SEQ ID NOs:4448, 4449, and 4450, respectively. In one aspect, provided herein is an antibody that binds TRGDC, comprising: (i) a VH comprising a VH CDR1, a VH CDR2, and a VH CDR3 having an amino acid sequence of a VH CDR1, a VH CDR2, and a VH CDR3, respectively, of a VH having an amino acid sequence of SEQ ID NO:4451; and (ii) a VL comprising a VL CDR1, a VL CDR2, and a VL CDR3 having an amino acid sequence of a VL CDR1, a VL CDR2, and a VL CDR3, respectively, of SEQ ID NO:4452. In one aspect, provided herein is an antibody that binds TRGDC, comprising a VH having an amino acid sequence of SEQ ID NO:4451. In one aspect, provided herein is an antibody that binds TRGDC, comprising a VL having an amino acid sequence of SEQ ID NO:4452. In one aspect, provided herein is an antibody that binds TRGDC, comprising a VH having an amino acid sequence of SEQ ID NO:4451, and a VL having an amino acid sequence of SEQ ID NO:4452. In one aspect, provided herein is an antibody that binds TRGDC, comprising a heavy chain having an amino acid sequence of SEQ ID NO:4453. In one aspect, provided herein is an antibody that binds TRGDC, comprising a light chain having an amino acid sequence of SEQ ID NO:4454. In one aspect, provided herein is an antibody that binds TRGDC, comprising a heavy chain having an amino acid sequence of SEQ ID NO:4453, and a light chain having an amino acid sequence of SEQ ID NO:4454. In one aspect, provided herein is an antibody that binds TRGDC, comprising a VH having an amino acid sequence having at least 95% identity to an amino acid sequence of SEQ ID NO:4451. In one aspect, provided herein is an antibody that binds TRGDC, comprising a VL having an amino acid sequence having at least 95% identity to an amino acid sequence of SEQ ID NO:4452. In one aspect, provided herein is an antibody that binds TRGDC, comprising a VH having an amino acid sequence having at least 95% identity to an amino acid sequence of SEQ ID NO:4451, and a VL having an amino acid sequence having at least 95% identity to an amino acid sequence of SEQ ID NO:4452. In one aspect, provided herein is an antibody that binds TRGDC, comprising a heavy chain having an amino acid sequence having at least 95% identity to an amino acid sequence of SEQ ID NO:4453. In one aspect, provided herein is an antibody that binds TRGDC, comprising a light chain having an amino acid sequence having at least 95% identity to an amino acid sequence of SEQ ID NO:4454. In one aspect, provided herein is an antibody that binds TRGDC, comprising a heavy chain having an amino acid sequence having at least 95% identity to an amino acid sequence of SEQ ID NO:4453, and a light chain having an amino acid sequence having at least 95% identity to an amino acid sequence of SEQ ID NO:4454.

[0248] In one aspect, provided herein is an antibody that binds TRGDC, comprising: (i) a VH comprising a VH CDR1, a VH CDR2, and a VH CDR3 having an amino acid sequence of SEQ ID NOs:4455, 4456, and 4457, respectively, and (ii) a VL comprising a VL CDR1, VL CDR2, and VL CDR3 having an amino acid sequence of SEQ ID NOs:4458, 4459, and 4460, respectively. In one aspect, provided herein is an antibody that binds TRGDC, comprising: (i) a VH comprising a VH CDR1, a VH CDR2, and a VH CDR3 having an amino acid sequence of SEQ ID NOs:4461, 4462, and 4463, respectively, and (ii) a VL comprising a VL CDR1, VL CDR2, and VL CDR3 having an amino acid sequence of SEQ ID NOs:4464, 4465, and 4466, respectively. In one aspect, provided herein is an antibody that binds TRGDC, comprising: (i) a VH comprising a VH CDR1, a VH CDR2, and a VH CDR3 having an amino acid sequence of SEQ ID NOs:4467, 4468, and 4469, respectively, and (ii) a VL comprising a VL CDR1, VL CDR2, and VL CDR3 having an amino acid sequence of SEQ ID NOs:4470, 4471, and 4472, respectively. In one aspect, provided herein is an antibody that binds TRGDC, comprising: (i) a VH comprising a VH CDR1, a VH CDR2, and a VH CDR3 having an amino acid sequence of SEQ ID NOs:4473, 4474, and 4475, respectively, and (ii) a VL comprising a VL CDR1, VL CDR2, and VL CDR3 having an amino acid sequence of SEQ ID NOs:4476, 4477, and 4478, respectively. In one aspect, provided herein is an antibody that binds TRGDC, comprising: (i) a VH comprising a VH CDR1, a VH CDR2, and a VH CDR3 having an amino acid sequence of SEQ ID NOs:4479, 4480, and 4481, respectively, and (ii) a VL comprising a VL CDR1, VL CDR2, and VL CDR3 having an amino acid sequence of SEQ ID NOs:4482, 4483, and 4484, respectively. In one aspect, provided herein is an antibody that binds TRGDC, comprising: (i) a VH comprising a VH CDR1, a VH CDR2, and a VH CDR3 having an amino acid sequence of a VH CDR1, a VH CDR2, and a VH CDR3, respectively, of a VH having an amino acid sequence of SEQ ID NO:4485; and (ii) a VL comprising a VL CDR1, a VL CDR2, and a VL CDR3 having an amino acid sequence of a VL CDR1, a VL CDR2, and a VL CDR3, respectively, of SEQ ID NO:4486. In one aspect, provided herein is an antibody that binds TRGDC, comprising a VH having an amino acid sequence of SEQ ID NO:4485. In one aspect, provided herein is an antibody that binds TRGDC, comprising a VL having an amino acid sequence of SEQ ID NO:4486. In one aspect, provided herein is an antibody that binds TRGDC, comprising a VH having an amino acid sequence of SEQ ID NO:4485, and a VL having an amino acid sequence of SEQ ID NO:4486. In one aspect, provided herein is an antibody that binds TRGDC, comprising a heavy chain having an amino acid sequence of SEQ ID NO:4487. In one aspect, provided herein is an antibody that binds TRGDC, comprising a light chain having an amino acid sequence of SEQ ID NO:4488. In one aspect, provided herein is an antibody that binds TRGDC, comprising a heavy chain having an amino acid sequence of SEQ ID NO:4487, and a light chain having an amino acid sequence of SEQ ID NO:4488. In one aspect, provided herein is an antibody that binds TRGDC, comprising a VH having an amino acid sequence having at least 95% identity to an amino acid sequence of SEQ ID NO:4485. In one aspect, provided herein is an antibody that binds TRGDC, comprising a VL having an amino acid sequence having at least 95% identity to an amino acid sequence of SEQ ID NO:4486. In one aspect, provided herein is an antibody that binds TRGDC, comprising a VH having an amino acid sequence having at least 95% identity to an amino acid sequence of SEQ ID NO:4485, and a VL having an amino acid sequence having at least 95% identity to an amino acid sequence of SEQ ID NO:4486. In one aspect, provided herein is an antibody that binds TRGDC, comprising a heavy chain having an amino acid sequence having at least 95% identity to an amino acid sequence of SEQ ID NO:4487. In one aspect, provided herein is an antibody that binds TRGDC, comprising a light chain having an amino acid sequence having at least 95% identity to an amino acid sequence of SEQ ID NO:4488. In one aspect, provided herein is an antibody that binds TRGDC, comprising a heavy chain having an amino acid sequence having at least 95% identity to an amino acid sequence of SEQ ID NO:4487, and a light chain having an amino acid sequence having at least 95% identity to an amino acid sequence of SEQ ID NO:4488.

[0249] In one aspect, provided herein is an antibody that binds TRGDC, comprising: (i) a VH comprising a VH CDR1, a VH CDR2, and a VH CDR3 having an amino acid sequence of SEQ ID NOs:4489, 4490, and 4491, respectively, and (ii) a VL comprising a VL CDR1, VL CDR2, and VL CDR3 having an amino acid sequence of SEQ ID NOs:4492, 4493, and 4494, respectively. In one aspect, provided herein is an antibody that binds TRGDC, comprising: (i) a VH comprising a VH CDR1, a VH CDR2, and a VH CDR3 having an amino acid sequence of SEQ ID NOs:4495, 4496, and 4497, respectively, and (ii) a VL comprising a VL CDR1, VL CDR2, and VL CDR3 having an amino acid sequence of SEQ ID NOs:4498, 4499, and 4500, respectively. In one aspect, provided herein is an antibody that binds TRGDC, comprising: (i) a VH comprising a VH CDR1, a VH CDR2, and a VH CDR3 having an amino acid sequence of SEQ ID NOs:4501, 4502, and 4503, respectively, and (ii) a VL comprising a VL CDR1, VL CDR2, and VL CDR3 having an amino acid sequence of SEQ ID NOs:4504, 4505, and 4506, respectively. In one aspect, provided herein is an antibody that binds TRGDC, comprising: (i) a VH comprising a VH CDR1, a VH CDR2, and a VH CDR3 having an amino acid sequence of SEQ ID NOs:4507, 4508, and 4509, respectively, and (ii) a VL comprising a VL CDR1, VL CDR2, and VL CDR3 having an amino acid sequence of SEQ ID NOs:4510, 4511, and 4512, respectively. In one aspect, provided herein is an antibody that binds TRGDC, comprising: (i) a VH comprising a VH CDR1, a VH CDR2, and a VH CDR3 having an amino acid sequence of SEQ ID NOs:4513, 4514, and 4515, respectively, and (ii) a VL comprising a VL CDR1, VL CDR2, and VL CDR3 having an amino acid sequence of SEQ ID NOs:4516, 4517, and 4518, respectively. In one aspect, provided herein is an antibody that binds TRGDC, comprising: (i) a VH comprising a VH CDR1, a VH CDR2, and a VH CDR3 having an amino acid sequence of a VH CDR1, a VH CDR2, and a VH CDR3, respectively, of a VH having an amino acid sequence of SEQ ID NO:4519; and (ii) a VL comprising a VL CDR1, a VL CDR2, and a VL CDR3 having an amino acid sequence of a VL CDR1, a VL CDR2, and a VL CDR3, respectively, of SEQ ID NO:4520. In one aspect, provided herein is an antibody that binds TRGDC, comprising a VH having an amino acid sequence of SEQ ID NO:4519. In one aspect, provided herein is an antibody that binds TRGDC, comprising a VL having an amino acid sequence of SEQ ID NO:4520. In one aspect, provided herein is an antibody that binds TRGDC, comprising a VH having an amino acid sequence of SEQ ID NO:4519, and a VL having an amino acid sequence of SEQ ID NO:4520. In one aspect, provided herein is an antibody that binds TRGDC, comprising a heavy chain having an amino acid sequence of SEQ ID NO:4521. In one aspect, provided herein is an antibody that binds TRGDC, comprising a light chain having an amino acid sequence of SEQ ID NO:4522. In one aspect, provided herein is an antibody that binds TRGDC, comprising a heavy chain having an amino acid sequence of SEQ ID NO:4521, and a light chain having an amino acid sequence of SEQ ID NO:4522. In one aspect, provided herein is an antibody that binds TRGDC, comprising a VH having an amino acid sequence having at least 95% identity to an amino acid sequence of SEQ ID NO:4519. In one aspect, provided herein is an antibody that binds TRGDC, comprising a VL having an amino acid sequence having at least 95% identity to an amino acid sequence of SEQ ID NO:4520. In one aspect, provided herein is an antibody that binds TRGDC, comprising a VH having an amino acid sequence having at least 95% identity to an amino acid sequence of SEQ ID NO:4519, and a VL having an amino acid sequence having at least 95% identity to an amino acid sequence of SEQ ID NO:4520. In one aspect, provided herein is an antibody that binds TRGDC, comprising a heavy chain having an amino acid sequence having at least 95% identity to an amino acid sequence of SEQ ID NO:4521. In one aspect, provided herein is an antibody that binds TRGDC, comprising a light chain having an amino acid sequence having at least 95% identity to an amino acid sequence of SEQ ID NO:4522. In one aspect, provided herein is an antibody that binds TRGDC, comprising a heavy chain having an amino acid sequence having at least 95% identity to an amino acid sequence of SEQ ID NO:4521, and a light chain having an amino acid sequence having at least 95% identity to an amino acid sequence of SEQ ID NO:4522.

[0250] In one aspect, provided herein is an antibody that binds TRGDC, comprising: (i) a VH comprising a VH CDR1, a VH CDR2, and a VH CDR3 having an amino acid sequence of SEQ ID NOs:4523, 4524, and 4525, respectively, and (ii) a VL comprising a VL CDR1, VL CDR2, and VL CDR3 having an amino acid sequence of SEQ ID NOs:4526, 4527, and 4528, respectively. In one aspect, provided herein is an antibody that binds TRGDC, comprising: (i) a VH comprising a VH CDR1, a VH CDR2, and a VH CDR3 having an amino acid sequence of SEQ ID NOs:4529, 4530, and 4531, respectively, and (ii) a VL comprising a VL CDR1, VL CDR2, and VL CDR3 having an amino acid sequence of SEQ ID NOs:4532, 4533, and 4534, respectively. In one aspect, provided herein is an antibody that binds TRGDC, comprising: (i) a VH comprising a VH CDR1, a VH CDR2, and a VH CDR3 having an amino acid sequence of SEQ ID NOs:4535, 4536, and 4537, respectively, and (ii) a VL comprising a VL CDR1, VL CDR2, and VL CDR3 having an amino acid sequence of SEQ ID NOs:4538, 4539, and 4540, respectively. In one aspect, provided herein is an antibody that binds TRGDC, comprising: (i) a VH comprising a VH CDR1, a VH CDR2, and a VH CDR3 having an amino acid sequence of SEQ ID NOs:4541, 4542, and 4543, respectively, and (ii) a VL comprising a VL CDR1, VL CDR2, and VL CDR3 having an amino acid sequence of SEQ ID NOs:4544, 4545, and 4546, respectively. In one aspect, provided herein is an antibody that binds TRGDC, comprising: (i) a VH comprising a VH CDR1, a VH CDR2, and a VH CDR3 having an amino acid sequence of SEQ ID NOs:4547, 4548, and 4549, respectively, and (ii) a VL comprising a VL CDR1, VL CDR2, and VL CDR3 having an amino acid sequence of SEQ ID NOs:4550, 4551, and 4552, respectively. In one aspect, provided herein is an antibody that binds TRGDC, comprising: (i) a VH comprising a VH CDR1, a VH CDR2, and a VH CDR3 having an amino acid sequence of a VH CDR1, a VH CDR2, and a VH CDR3, respectively, of a VH having an amino acid sequence of SEQ ID NO:4553; and (ii) a VL comprising a VL CDR1, a VL CDR2, and a VL CDR3 having an amino acid sequence of a VL CDR1, a VL CDR2, and a VL CDR3, respectively, of SEQ ID NO:4554. In one aspect, provided herein is an antibody that binds TRGDC, comprising a VH having an amino acid sequence of SEQ ID NO:4553. In one aspect, provided herein is an antibody that binds TRGDC, comprising a VL having an amino acid sequence of SEQ ID NO:4554. In one aspect, provided herein is an antibody that binds TRGDC, comprising a VH having an amino acid sequence of SEQ ID NO:4553, and a VL having an amino acid sequence of SEQ ID NO:4554. In one aspect, provided herein is an antibody that binds TRGDC, comprising a heavy chain having an amino acid sequence of SEQ ID NO:4555. In one aspect, provided herein is an antibody that binds TRGDC, comprising a light chain having an amino acid sequence of SEQ ID NO:4556. In one aspect, provided herein is an antibody that binds TRGDC, comprising a heavy chain having an amino acid sequence of SEQ ID NO:4555, and a light chain having an amino acid sequence of SEQ ID NO:4556. In one aspect, provided herein is an antibody that binds TRGDC, comprising a VH having an amino acid sequence having at least 95% identity to an amino acid sequence of SEQ ID NO:4553. In one aspect, provided herein is an antibody that binds TRGDC, comprising a VL having an amino acid sequence having at least 95% identity to an amino acid sequence of SEQ ID NO:4554. In one aspect, provided herein is an antibody that binds TRGDC, comprising a VH having an amino acid sequence having at least 95% identity to an amino acid sequence of SEQ ID NO:4553, and a VL having an amino acid sequence having at least 95% identity to an amino acid sequence of SEQ ID NO:4554. In one aspect, provided herein is an antibody that binds TRGDC, comprising a heavy chain having an amino acid sequence having at least 95% identity to an amino acid sequence of SEQ ID NO:4555. In one aspect, provided herein is an antibody that binds TRGDC, comprising a light chain having an amino acid sequence having at least 95% identity to an amino acid sequence of SEQ ID NO:4556. In one aspect, provided herein is an antibody that binds TRGDC, comprising a heavy chain having an amino acid sequence having at least 95% identity to an amino acid sequence of SEQ ID NO:4555, and a light chain having an amino acid sequence having at least 95% identity to an amino acid sequence of SEQ ID NO:4556.

[0251] In one aspect, provided herein is an antibody that binds TRGDC, comprising: (i) a VH comprising a VH CDR1, a VH CDR2, and a VH CDR3 having an amino acid sequence of SEQ ID NOs:4557, 4558, and 4559, respectively, and (ii) a VL comprising a VL CDR1, VL CDR2, and VL CDR3 having an amino acid sequence of SEQ ID NOs:4560, 4561, and 4562, respectively. In one aspect, provided herein is an antibody that binds TRGDC, comprising: (i) a VH comprising a VH CDR1, a VH CDR2, and a VH CDR3 having an amino acid sequence of SEQ ID NOs:4563, 4564, and 4565, respectively, and (ii) a VL comprising a VL CDR1, VL CDR2, and VL CDR3 having an amino acid sequence of SEQ ID NOs:4566, 4567, and 4568, respectively. In one aspect, provided herein is an antibody that binds TRGDC, comprising: (i) a VH comprising a VH CDR1, a VH CDR2, and a VH CDR3 having an amino acid sequence of SEQ ID NOs:4569, 4570, and 4571, respectively, and (ii) a VL comprising a VL CDR1, VL CDR2, and VL CDR3 having an amino acid sequence of SEQ ID NOs:4572, 4573, and 4574, respectively. In one aspect, provided herein is an antibody that binds TRGDC, comprising: (i) a VH comprising a VH CDR1, a VH CDR2, and a VH CDR3 having an amino acid sequence of SEQ ID NOs:4575, 4576, and 4577, respectively, and (ii) a VL comprising a VL CDR1, VL CDR2, and VL CDR3 having an amino acid sequence of SEQ ID NOs:4578, 4579, and 4580, respectively. In one aspect, provided herein is an antibody that binds TRGDC, comprising: (i) a VH comprising a VH CDR1, a VH CDR2, and a VH CDR3 having an amino acid sequence of SEQ ID NOs:4581, 4582, and 4583, respectively, and (ii) a VL comprising a VL CDR1, VL CDR2, and VL CDR3 having an amino acid sequence of SEQ ID NOs:4584, 4585, and 4586, respectively. In one aspect, provided herein is an antibody that binds TRGDC, comprising: (i) a VH comprising a VH CDR1, a VH CDR2, and a VH CDR3 having an amino acid sequence of a VH CDR1, a VH CDR2, and a VH CDR3, respectively, of a VH having an amino acid sequence of SEQ ID NO:4587; and (ii) a VL comprising a VL CDR1, a VL CDR2, and a VL CDR3 having an amino acid sequence of a VL CDR1, a VL CDR2, and a VL CDR3, respectively, of SEQ ID NO:4588. In one aspect, provided herein is an antibody that binds TRGDC, comprising a VH having an amino acid sequence of SEQ ID NO:4587. In one aspect, provided herein is an antibody that binds TRGDC, comprising a VL having an amino acid sequence of SEQ ID NO:4588. In one aspect, provided herein is an antibody that binds TRGDC, comprising a VH having an amino acid sequence of SEQ ID NO:4587, and a VL having an amino acid sequence of SEQ ID NO:4588. In one aspect, provided herein is an antibody that binds TRGDC, comprising a heavy chain having an amino acid sequence of SEQ ID NO:4589. In one aspect, provided herein is an antibody that binds TRGDC, comprising a light chain having an amino acid sequence of SEQ ID NO:4590. In one aspect, provided herein is an antibody that binds TRGDC, comprising a heavy chain having an amino acid sequence of SEQ ID NO:4589, and a light chain having an amino acid sequence of SEQ ID NO:4590. In one aspect, provided herein is an antibody that binds TRGDC, comprising a VH having an amino acid sequence having at least 95% identity to an amino acid sequence of SEQ ID NO:4587. In one aspect, provided herein is an antibody that binds TRGDC, comprising a VL having an amino acid sequence having at least 95% identity to an amino acid sequence of SEQ ID NO:4588. In one aspect, provided herein is an antibody that binds TRGDC, comprising a VH having an amino acid sequence having at least 95% identity to an amino acid sequence of SEQ ID NO:4587, and a VL having an amino acid sequence having at least 95% identity to an amino acid sequence of SEQ ID NO:4588. In one aspect, provided herein is an antibody that binds TRGDC, comprising a heavy chain having an amino acid sequence having at least 95% identity to an amino acid sequence of SEQ ID NO:4589. In one aspect, provided herein is an antibody that binds TRGDC, comprising a light chain having an amino acid sequence having at least 95% identity to an amino acid sequence of SEQ ID NO:4590. In one aspect, provided herein is an antibody that binds TRGDC, comprising a heavy chain having an amino acid sequence having at least 95% identity to an amino acid sequence of SEQ ID NO:4589, and a light chain having an amino acid sequence having at least 95% identity to an amino acid sequence of SEQ ID NO:4590.

[0252] In one aspect, provided herein is an antibody that binds TRGDC, comprising: (i) a VH comprising a VH CDR1, a VH CDR2, and a VH CDR3 having an amino acid sequence of SEQ ID NOs:4591, 4592, and 4593, respectively, and (ii) a VL comprising a VL CDR1, VL CDR2, and VL CDR3 having an amino acid sequence of SEQ ID NOs:4594, 4595, and 4596, respectively. In one aspect, provided herein is an antibody that binds TRGDC, comprising: (i) a VH comprising a VH CDR1, a VH CDR2, and a VH CDR3 having an amino acid sequence of SEQ ID NOs:4597, 4598, and 4599, respectively, and (ii) a VL comprising a VL CDR1, VL CDR2, and VL CDR3 having an amino acid sequence of SEQ ID NOs:4600, 4601, and 4602, respectively. In one aspect, provided herein is an antibody that binds TRGDC, comprising: (i) a VH comprising a VH CDR1, a VH CDR2, and a VH CDR3 having an amino acid sequence of SEQ ID NOs:4603, 4604, and 4605, respectively, and (ii) a VL comprising a VL CDR1, VL CDR2, and VL CDR3 having an amino acid sequence of SEQ ID NOs:4606, 4607, and 4608, respectively. In one aspect, provided herein is an antibody that binds TRGDC, comprising: (i) a VH comprising a VH CDR1, a VH CDR2, and a VH CDR3 having an amino acid sequence of SEQ ID NOs:4609, 4610, and 4611, respectively, and (ii) a VL comprising a VL CDR1, VL CDR2, and VL CDR3 having an amino acid sequence of SEQ ID NOs:4612, 4613, and 4614, respectively. In one aspect, provided herein is an antibody that binds TRGDC, comprising: (i) a VH comprising a VH CDR1, a VH CDR2, and a VH CDR3 having an amino acid sequence of SEQ ID NOs:4615, 4616, and 4617, respectively, and (ii) a VL comprising a VL CDR1, VL CDR2, and VL CDR3 having an amino acid sequence of SEQ ID NOs:4618, 4619, and 4620, respectively. In one aspect, provided herein is an antibody that binds TRGDC, comprising: (i) a VH comprising a VH CDR1, a VH CDR2, and a VH CDR3 having an amino acid sequence of a VH CDR1, a VH CDR2, and a VH CDR3, respectively, of a VH having an amino acid sequence of SEQ ID NO:4621; and (ii) a VL comprising a VL CDR1, a VL CDR2, and a VL CDR3 having an amino acid sequence of a VL CDR1, a VL CDR2, and a VL CDR3, respectively, of SEQ ID NO:4622. In one aspect, provided herein is an antibody that binds TRGDC, comprising a VH having an amino acid sequence of SEQ ID NO:4621. In one aspect, provided herein is an antibody that binds TRGDC, comprising a VL having an amino acid sequence of SEQ ID NO:4622. In one aspect, provided herein is an antibody that binds TRGDC, comprising a VH having an amino acid sequence of SEQ ID NO:4621, and a VL having an amino acid sequence of SEQ ID NO:4622. In one aspect, provided herein is an antibody that binds TRGDC, comprising a heavy chain having an amino acid sequence of SEQ ID NO:4623. In one aspect, provided herein is an antibody that binds TRGDC, comprising a light chain having an amino acid sequence of SEQ ID NO:4624. In one aspect, provided herein is an antibody that binds TRGDC, comprising a heavy chain having an amino acid sequence of SEQ ID NO:4623, and a light chain having an amino acid sequence of SEQ ID NO:4624. In one aspect, provided herein is an antibody that binds TRGDC, comprising a VH having an amino acid sequence having at least 95% identity to an amino acid sequence of SEQ ID NO:4621. In one aspect, provided herein is an antibody that binds TRGDC, comprising a VL having an amino acid sequence having at least 95% identity to an amino acid sequence of SEQ ID NO:4622. In one aspect, provided herein is an antibody that binds TRGDC, comprising a VH having an amino acid sequence having at least 95% identity to an amino acid sequence of SEQ ID NO:4621, and a VL having an amino acid sequence having at least 95% identity to an amino acid sequence of SEQ ID NO:4622. In one aspect, provided herein is an antibody that binds TRGDC, comprising a heavy chain having an amino acid sequence having at least 95% identity to an amino acid sequence of SEQ ID NO:4623. In one aspect, provided herein is an antibody that binds TRGDC, comprising a light chain having an amino acid sequence having at least 95% identity to an amino acid sequence of SEQ ID NO:4624. In one aspect, provided herein is an antibody that binds TRGDC, comprising a heavy chain having an amino acid sequence having at least 95% identity to an amino acid sequence of SEQ ID NO:4623, and a light chain having an amino acid sequence having at least 95% identity to an amino acid sequence of SEQ ID NO:4624.

[0253] In one aspect, provided herein is an antibody that binds TRGDC, comprising: (i) a VH comprising a VH CDR1, a VH CDR2, and a VH CDR3 having an amino acid sequence of SEQ ID NOs:4625, 4626, and 4627, respectively, and (ii) a VL comprising a VL CDR1, VL CDR2, and VL CDR3 having an amino acid sequence of SEQ ID NOs:4628, 4629, and 4630, respectively. In one aspect, provided herein is an antibody that binds TRGDC, comprising: (i) a VH comprising a VH CDR1, a VH CDR2, and a VH CDR3 having an amino acid sequence of SEQ ID NOs:4631, 4632, and 4633, respectively, and (ii) a VL comprising a VL CDR1, VL CDR2, and VL CDR3 having an amino acid sequence of SEQ ID NOs:4634, 4635, and 4636, respectively. In one aspect, provided herein is an antibody that binds TRGDC, comprising: (i) a VH comprising a VH CDR1, a VH CDR2, and a VH CDR3 having an amino acid sequence of SEQ ID NOs:4637, 4638, and 4639, respectively, and (ii) a VL comprising a VL CDR1, VL CDR2, and VL CDR3 having an amino acid sequence of SEQ ID NOs:4640, 4641, and 4642, respectively. In one aspect, provided herein is an antibody that binds TRGDC, comprising: (i) a VH comprising a VH CDR1, a VH CDR2, and a VH CDR3 having an amino acid sequence of SEQ ID NOs:4643, 4644, and 4645, respectively, and (ii) a VL comprising a VL CDR1, VL CDR2, and VL CDR3 having an amino acid sequence of SEQ ID NOs:4646, 4647, and 4648, respectively. In one aspect, provided herein is an antibody that binds TRGDC, comprising: (i) a VH comprising a VH CDR1, a VH CDR2, and a VH CDR3 having an amino acid sequence of SEQ ID NOs:4649, 4650, and 4651, respectively, and (ii) a VL comprising a VL CDR1, VL CDR2, and VL CDR3 having an amino acid sequence of SEQ ID NOs:4652, 4653, and 4654, respectively. In one aspect, provided herein is an antibody that binds TRGDC, comprising: (i) a VH comprising a VH CDR1, a VH CDR2, and a VH CDR3 having an amino acid sequence of a VH CDR1, a VH CDR2, and a VH CDR3, respectively, of a VH having an amino acid sequence of SEQ ID NO:4655; and (ii) a VL comprising a VL CDR1, a VL CDR2, and a VL CDR3 having an amino acid sequence of a VL CDR1, a VL CDR2, and a VL CDR3, respectively, of SEQ ID NO:4656. In one aspect, provided herein is an antibody that binds TRGDC, comprising a VH having an amino acid sequence of SEQ ID NO:4655. In one aspect, provided herein is an antibody that binds TRGDC, comprising a VL having an amino acid sequence of SEQ ID NO:4656. In one aspect, provided herein is an antibody that binds TRGDC, comprising a VH having an amino acid sequence of SEQ ID NO:4655, and a VL having an amino acid sequence of SEQ ID NO:4656. In one aspect, provided herein is an antibody that binds TRGDC, comprising a heavy chain having an amino acid sequence of SEQ ID NO:4657. In one aspect, provided herein is an antibody that binds TRGDC, comprising a light chain having an amino acid sequence of SEQ ID NO:4658. In one aspect, provided herein is an antibody that binds TRGDC, comprising a heavy chain having an amino acid sequence of SEQ ID NO:4657, and a light chain having an amino acid sequence of SEQ ID NO:4658. In one aspect, provided herein is an antibody that binds TRGDC, comprising a VH having an amino acid sequence having at least 95% identity to an amino acid sequence of SEQ ID NO:4655. In one aspect, provided herein is an antibody that binds TRGDC, comprising a VL having an amino acid sequence having at least 95% identity to an amino acid sequence of SEQ ID NO:4656. In one aspect, provided herein is an antibody that binds TRGDC, comprising a VH having an amino acid sequence having at least 95% identity to an amino acid sequence of SEQ ID NO:4655, and a VL having an amino acid sequence having at least 95% identity to an amino acid sequence of SEQ ID NO:4656. In one aspect, provided herein is an antibody that binds TRGDC, comprising a heavy chain having an amino acid sequence having at least 95% identity to an amino acid sequence of SEQ ID NO:4657. In one aspect, provided herein is an antibody that binds TRGDC, comprising a light chain having an amino acid sequence having at least 95% identity to an amino acid sequence of SEQ ID NO:4658. In one aspect, provided herein is an antibody that binds TRGDC, comprising a heavy chain having an amino acid sequence having at least 95% identity to an amino acid sequence of SEQ ID NO:4657, and a light chain having an amino acid sequence having at least 95% identity to an amino acid sequence of SEQ ID NO:4658.

[0254] In one aspect, provided herein is an antibody that binds TRGDC. In one embodiment, the TRGDC antibody comprises: a VH comprising a VH CDR1, a VH CDR2, and a VH CDR3 having an amino acid sequence of a VH CDR1, a VH CDR2, and a VH CDR3, respectively, of a VH having an amino acid sequence of SEQ ID NO:4145. In one embodiment, the TRGDC antibody comprises: a VL comprising a VL CDR1, a VL CDR2, and a VL CDR3 having an amino acid sequence of a VL CDR1, a VL CDR2, and a VL CDR3, respectively, of a VL having an amino acid sequence of SEQ ID NO:4146. In one embodiment, the TRGDC antibody comprises: a VH comprising a VH CDR1, a VH CDR2, and a VH CDR3 having an amino acid sequence of a VH CDR1, a VH CDR2, and a VH CDR3, respectively, of a VH having an amino acid sequence of SEQ ID NO:4145; and a VL comprising a VL CDR1, a VL CDR2, and a VL CDR3 having an amino acid sequence of a VL CDR1, a VL CDR2, and a VL CDR3, respectively, of a VL having an amino acid sequence of SEQ ID NO:4146. In one embodiment, the TRGDC antibody comprises: a VH comprising a VH CDR1, a VH CDR2, and a VH CDR3 having an amino acid sequence of a VH CDR1, a VH CDR2, and a VH CDR3, respectively, of a VH having an amino acid sequence of SEQ ID NO:4179. In one embodiment, the TRGDC antibody comprises: a VL comprising a VL CDR1, a VL CDR2, and a VL CDR3 having an amino acid sequence of a VL CDR1, a VL CDR2, and a VL CDR3, respectively, of a VL having an amino acid sequence of SEQ ID NO:4180. In one embodiment, the TRGDC antibody comprises: a VH comprising a VH CDR1, a VH CDR2, and a VH CDR3 having an amino acid sequence of a VH CDR1, a VH CDR2, and a VH CDR3, respectively, of a VH having an amino acid sequence of SEQ ID NO:4179; and a VL comprising a VL CDR1, a VL CDR2, and a VL CDR3 having an amino acid sequence of a VL CDR1, a VL CDR2, and a VL CDR3, respectively, of a VL having an amino acid sequence of SEQ ID NO:4180. In one embodiment, the TRGDC antibody comprises: a VH comprising a VH CDR1, a VH CDR2, and a VH CDR3 having an amino acid sequence of a VH CDR1, a VH CDR2, and a VH CDR3, respectively, of a VH having an amino acid sequence of SEQ ID NO:4213. In one embodiment, the TRGDC antibody comprises: a VL comprising a VL CDR1, a VL CDR2, and a VL CDR3 having an amino acid sequence of a VL CDR1, a VL CDR2, and a VL CDR3, respectively, of a VL having an amino acid sequence of SEQ ID NO:4214. In one embodiment, the TRGDC antibody comprises: a VH comprising a VH CDR1, a VH CDR2, and a VH CDR3 having an amino acid sequence of a VH CDR1, a VH CDR2, and a VH CDR3, respectively, of a VH having an amino acid sequence of SEQ ID NO:4213; and a VL comprising a VL CDR1, a VL CDR2, and a VL CDR3 having an amino acid sequence of a VL CDR1, a VL CDR2, and a VL CDR3, respectively, of a VL having an amino acid sequence of SEQ ID NO:4214. In one embodiment, the TRGDC antibody comprises: a VH comprising a VH CDR1, a VH CDR2, and a VH CDR3 having an amino acid sequence of a VH CDR1, a VH CDR2, and a VH CDR3, respectively, of a VH having an amino acid sequence of SEQ ID NO:4247. In one embodiment, the TRGDC antibody comprises: a VL comprising a VL CDR1, a VL CDR2, and a VL CDR3 having an amino acid sequence of a VL CDR1, a VL CDR2, and a VL CDR3, respectively, of a VL having an amino acid sequence of SEQ ID NO:4248. In one embodiment, the TRGDC antibody comprises: a VH comprising a VH CDR1, a VH CDR2, and a VH CDR3 having an amino acid sequence of a VH CDR1, a VH CDR2, and a VH CDR3, respectively, of a VH having an amino acid sequence of SEQ ID NO:4247; and a VL comprising a VL CDR1, a VL CDR2, and a VL CDR3 having an amino acid sequence of a VL CDR1, a VL CDR2, and a VL CDR3, respectively, of a VL having an amino acid sequence of SEQ ID NO:4248. In one embodiment, the TRGDC antibody comprises: a VH comprising a VH CDR1, a VH CDR2, and a VH CDR3 having an amino acid sequence of a VH CDR1, a VH CDR2, and a VH CDR3, respectively, of a VH having an amino acid sequence of SEQ ID NO:4281. In one embodiment, the TRGDC antibody comprises: a VL comprising a VL CDR1, a VL CDR2, and a VL CDR3 having an amino acid sequence of a VL CDR1, a VL CDR2, and a VL CDR3, respectively, of a VL having an amino acid sequence of SEQ ID NO:4282. In one embodiment, the TRGDC antibody comprises: a VH comprising a VH CDR1, a VH CDR2, and a VH CDR3 having an amino acid sequence of a VH CDR1, a VH CDR2, and a VH CDR3, respectively, of a VH having an amino acid sequence of SEQ ID NO:4281; and a VL comprising a VL CDR1, a VL CDR2, and a VL CDR3 having an amino acid sequence of a VL CDR1, a VL CDR2, and a VL CDR3, respectively, of a VL having an amino acid sequence of SEQ ID NO:4282. In one embodiment, the TRGDC antibody comprises: a VH comprising a VH CDR1, a VH CDR2, and a VH CDR3 having an amino acid sequence of a VH CDR1, a VH CDR2, and a VH CDR3, respectively, of a VH having an amino acid sequence of SEQ ID NO:4315. In one embodiment, the TRGDC antibody comprises: a VL comprising a VL CDR1, a VL CDR2, and a VL CDR3 having an amino acid sequence of a VL CDR1, a VL CDR2, and a VL CDR3, respectively, of a VL having an amino acid sequence of SEQ ID NO:4316. In one embodiment, the TRGDC antibody comprises: a VH comprising a VH CDR1, a VH CDR2, and a VH CDR3 having an amino acid sequence of a VH CDR1, a VH CDR2, and a VH CDR3, respectively, of a VH having an amino acid sequence of SEQ ID NO:4315; and a VL comprising a VL CDR1, a VL CDR2, and a VL CDR3 having an amino acid sequence of a VL CDR1, a VL CDR2, and a VL CDR3, respectively, of a VL having an amino acid sequence of SEQ ID NO:4316. In one embodiment, the TRGDC antibody comprises: a VH comprising a VH CDR1, a VH CDR2, and a VH CDR3 having an amino acid sequence of a VH CDR1, a VH CDR2, and a VH CDR3, respectively, of a VH having an amino acid sequence of SEQ ID NO:4349. In one embodiment, the TRGDC antibody comprises: a VL comprising a VL CDR1, a VL CDR2, and a VL CDR3 having an amino acid sequence of a VL CDR1, a VL CDR2, and a VL CDR3, respectively, of a VL having an amino acid sequence of SEQ ID NO:4350. In one embodiment, the TRGDC antibody comprises: a VH comprising a VH CDR1, a VH CDR2, and a VH CDR3 having an amino acid sequence of a VH CDR1, a VH CDR2, and a VH CDR3, respectively, of a VH having an amino acid sequence of SEQ ID NO:4349; and a VL comprising a VL CDR1, a VL CDR2, and a VL CDR3 having an amino acid sequence of a VL CDR1, a VL CDR2, and a VL CDR3, respectively, of a VL having an amino acid sequence of SEQ ID NO:4350. In one embodiment, the TRGDC antibody comprises: a VH comprising a VH CDR1, a VH CDR2, and a VH CDR3 having an amino acid sequence of a VH CDR1, a VH CDR2, and a VH CDR3, respectively, of a VH having an amino acid sequence of SEQ ID NO:4383. In one embodiment, the TRGDC antibody comprises: a VL comprising a VL CDR1, a VL CDR2, and a VL CDR3 having an amino acid sequence of a VL CDR1, a VL CDR2, and a VL CDR3, respectively, of a VL having an amino acid sequence of SEQ ID NO:4384. In one embodiment, the TRGDC antibody comprises: a VH comprising a VH CDR1, a VH CDR2, and a VH CDR3 having an amino acid sequence of a VH CDR1, a VH CDR2, and a VH CDR3, respectively, of a VH having an amino acid sequence of SEQ ID NO:4383; and a VL comprising a VL CDR1, a VL CDR2, and a VL CDR3 having an amino acid sequence of a VL CDR1, a VL CDR2, and a VL CDR3, respectively, of a VL having an amino acid sequence of SEQ ID NO:4384. In one embodiment, the TRGDC antibody comprises: a VH comprising a VH CDR1, a VH CDR2, and a VH CDR3 having an amino acid sequence of a VH CDR1, a VH CDR2, and a VH CDR3, respectively, of a VH having an amino acid sequence of SEQ ID NO:4417. In one embodiment, the TRGDC antibody comprises: a VL comprising a VL CDR1, a VL CDR2, and a VL CDR3 having an amino acid sequence of a VL CDR1, a VL CDR2, and a VL CDR3, respectively, of a VL having an amino acid sequence of SEQ ID NO:4418. In one embodiment, the TRGDC antibody comprises: a VH comprising a VH CDR1, a VH CDR2, and a VH CDR3 having an amino acid sequence of a VH CDR1, a VH CDR2, and a VH CDR3, respectively, of a VH having an amino acid sequence of SEQ ID NO:4417; and a VL comprising a VL CDR1, a VL CDR2, and a VL CDR3 having an amino acid sequence of a VL CDR1, a VL CDR2, and a VL CDR3, respectively, of a VL having an amino acid sequence of SEQ ID NO:4418. In one embodiment, the TRGDC antibody comprises: a VH comprising a VH CDR1, a VH CDR2, and a VH CDR3 having an amino acid sequence of a VH CDR1, a VH CDR2, and a VH CDR3, respectively, of a VH having an amino acid sequence of SEQ ID NO:4451. In one embodiment, the TRGDC antibody comprises: a VL comprising a VL CDR1, a VL CDR2, and a VL CDR3 having an amino acid sequence of a VL CDR1, a VL CDR2, and a VL CDR3, respectively, of a VL having an amino acid sequence of SEQ ID NO:4452. In one embodiment, the TRGDC antibody comprises: a VH comprising a VH CDR1, a VH CDR2, and a VH CDR3 having an amino acid sequence of a VH CDR1, a VH CDR2, and a VH CDR3, respectively, of a VH having an amino acid sequence of SEQ ID NO:4451; and a VL comprising a VL CDR1, a VL CDR2, and a VL CDR3 having an amino acid sequence of a VL CDR1, a VL CDR2, and a VL CDR3, respectively, of a VL having an amino acid sequence of SEQ ID NO:4452. In one embodiment, the TRGDC antibody comprises: a VH comprising a VH CDR1, a VH CDR2, and a VH CDR3 having an amino acid sequence of a VH CDR1, a VH CDR2, and a VH CDR3, respectively, of a VH having an amino acid sequence of SEQ ID NO:4485. In one embodiment, the TRGDC antibody comprises: a VL comprising a VL CDR1, a VL CDR2, and a VL CDR3 having an amino acid sequence of a VL CDR1, a VL CDR2, and a VL CDR3, respectively, of a VL having an amino acid sequence of SEQ ID NO:4486. In one embodiment, the TRGDC antibody comprises: a VH comprising a VH CDR1, a VH CDR2, and a VH CDR3 having an amino acid sequence of a VH CDR1, a VH CDR2, and a VH CDR3, respectively, of a VH having an amino acid sequence of SEQ ID NO:4485; and a VL comprising a VL CDR1, a VL CDR2, and a VL CDR3 having an amino acid sequence of a VL CDR1, a VL CDR2, and a VL CDR3, respectively, of a VL having an amino acid sequence of SEQ ID NO:4486. In one embodiment, the TRGDC antibody comprises: a VH comprising a VH CDR1, a VH CDR2, and a VH CDR3 having an amino acid sequence of a VH CDR1, a VH CDR2, and a VH CDR3, respectively, of a VH having an amino acid sequence of SEQ ID NO:4519. In one embodiment, the TRGDC antibody comprises: a VL comprising a VL CDR1, a VL CDR2, and a VL CDR3 having an amino acid sequence of a VL CDR1, a VL CDR2, and a VL CDR3, respectively, of a VL having an amino acid sequence of SEQ ID NO:4520. In one embodiment, the TRGDC antibody comprises: a VH comprising a VH CDR1, a VH CDR2, and a VH CDR3 having an amino acid sequence of a VH CDR1, a VH CDR2, and a VH CDR3, respectively, of a VH having an amino acid sequence of SEQ ID NO:4519; and a VL comprising a VL CDR1, a VL CDR2, and a VL CDR3 having an amino acid sequence of a VL CDR1, a VL CDR2, and a VL CDR3, respectively, of a VL having an amino acid sequence of SEQ ID NO:4520. In one embodiment, the TRGDC antibody comprises: a VH comprising a VH CDR1, a VH CDR2, and a VH CDR3 having an amino acid sequence of a VH CDR1, a VH CDR2, and a VH CDR3, respectively, of a VH having an amino acid sequence of SEQ ID NO:4553. In one embodiment, the TRGDC antibody comprises: a VL comprising a VL CDR1, a VL CDR2, and a VL CDR3 having an amino acid sequence of a VL CDR1, a VL CDR2, and a VL CDR3, respectively, of a VL having an amino acid sequence of SEQ ID NO:4554. In one embodiment, the TRGDC antibody comprises: a VH comprising a VH CDR1, a VH CDR2, and a VH CDR3 having an amino acid sequence of a VH CDR1, a VH CDR2, and a VH CDR3, respectively, of a VH having an amino acid sequence of SEQ ID NO:4553; and a VL comprising a VL CDR1, a VL CDR2, and a VL CDR3 having an amino acid sequence of a VL CDR1, a VL CDR2, and a VL CDR3, respectively, of a VL having an amino acid sequence of SEQ ID NO:4554. In one embodiment, the TRGDC antibody comprises: a VH comprising a VH CDR1, a VH CDR2, and a VH CDR3 having an amino acid sequence of a VH CDR1, a VH CDR2, and a VH CDR3, respectively, of a VH having an amino acid sequence of SEQ ID NO:4587. In one embodiment, the TRGDC antibody comprises: a VL comprising a VL CDR1, a VL CDR2, and a VL CDR3 having an amino acid sequence of a VL CDR1, a VL CDR2, and a VL CDR3, respectively, of a VL having an amino acid sequence of SEQ ID NO:4588. In one embodiment, the TRGDC antibody comprises: a VH comprising a VH CDR1, a VH CDR2, and a VH CDR3 having an amino acid sequence of a VH CDR1, a VH CDR2, and a VH CDR3, respectively, of a VH having an amino acid sequence of SEQ ID NO:4587; and a VL comprising a VL CDR1, a VL CDR2, and a VL CDR3 having an amino acid sequence of a VL CDR1, a VL CDR2, and a VL CDR3, respectively, of a VL having an amino acid sequence of SEQ ID NO:4588. In one embodiment, the TRGDC antibody comprises: a VH comprising a VH CDR1, a VH CDR2, and a VH CDR3 having an amino acid sequence of a VH CDR1, a VH CDR2, and a VH CDR3, respectively, of a VH having an amino acid sequence of SEQ ID NO:4621. In one embodiment, the TRGDC antibody comprises: a VL comprising a VL CDR1, a VL CDR2, and a VL CDR3 having an amino acid sequence of a VL CDR1, a VL CDR2, and a VL CDR3, respectively, of a VL having an amino acid sequence of SEQ ID NO:4622. In one embodiment, the TRGDC antibody comprises: a VH comprising a VH CDR1, a VH CDR2, and a VH CDR3 having an amino acid sequence of a VH CDR1, a VH CDR2, and a VH CDR3, respectively, of a VH having an amino acid sequence of SEQ ID NO:4621; and a VL comprising a VL CDR1, a VL CDR2, and a VL CDR3 having an amino acid sequence of a VL CDR1, a VL CDR2, and a VL CDR3, respectively, of a VL having an amino acid sequence of SEQ ID NO:4622. In one embodiment, the TRGDC antibody comprises: a VH comprising a VH CDR1, a VH CDR2, and a VH CDR3 having an amino acid sequence of a VH CDR1, a VH CDR2, and a VH CDR3, respectively, of a VH having an amino acid sequence of SEQ ID NO:4655. In one embodiment, the TRGDC antibody comprises: a VL comprising a VL CDR1, a VL CDR2, and a VL CDR3 having an amino acid sequence of a VL CDR1, a VL CDR2, and a VL CDR3, respectively, of a VL having an amino acid sequence of SEQ ID NO:4656. In one embodiment, the TRGDC antibody comprises: a VH comprising a VH CDR1, a VH CDR2, and a VH CDR3 having an amino acid sequence of a VH CDR1, a VH CDR2, and a VH CDR3, respectively, of a VH having an amino acid sequence of SEQ ID NO:4655; and a VL comprising a VL CDR1, a VL CDR2, and a VL CDR3 having an amino acid sequence of a VL CDR1, a VL CDR2, and a VL CDR3, respectively, of a VL having an amino acid sequence of SEQ ID NO:4656. In some embodiments, the TRGDC antibody is a multispecific antibody. In some embodiments, the TRGDC antibody is a bispecific antibody. In some embodiments, the TRGDC antibody is a trispecific antibody. In some embodiments, the TRGDC antibody is a quadraspecific antibody.

[0255] In one aspect, provided herein is an antibody that binds TRGDC, comprising a VH CDR1 having an amino acid sequence of SEQ ID NO:4139, wherein the eighth amino acid is R or S; a VH CDR2 having an amino acid sequence of SEQ ID NO:4140; a VH CDR3 having an amino acid sequence of SEQ ID NO:4141, wherein the third amino acid is D or G, the fourth amino acid is E or L, the sixth amino acid is E or G, the ninth amino acid is E or D, the eleventh amino acid is C or F. In one aspect, provided herein is an antibody that binds TRGDC, comprising a VL CDR1 having an amino acid sequence of SEQ ID NO:4142, wherein the fourth amino acid is H or S; a VL CDR2 having an amino acid sequence of SEQ ID NO:4143; and a VL CDR3 having an amino acid sequence of SEQ ID NO:4144, wherein the eighth amino acid is F or W. In one aspect, provided herein is an antibody that binds TRGDC, comprising a VH CDR1 having an amino acid sequence of SEQ ID NO:4139, wherein the eighth amino acid is R or S; a VH CDR2 having an amino acid sequence of SEQ ID NO:4140; a VH CDR3 having an amino acid sequence of SEQ ID NO:4141, wherein the third amino acid is D or G, the fourth amino acid is E or L, the sixth amino acid is E or G, the ninth amino acid is E or D, the eleventh amino acid is C or F; a VL CDR1 having an amino acid sequence of SEQ ID NO:4142, wherein the fourth amino acid is H or S; a VL CDR2 having an amino acid sequence of SEQ ID NO:4143; and a VL CDR3 having an amino acid sequence of SEQ ID NO:4144, wherein the eighth amino acid is F or W.

[0256] In one aspect, provided herein is an antibody that binds TRGDC, comprising a VH CDR1 having an amino acid sequence of SEQ ID NO:4173, wherein the first amino acid is G or R, the fourth amino acid is F or L, the sixth amino acid is N or S; a VH CDR2 having an amino acid sequence of SEQ ID NO:4174; a VH CDR3 having an amino acid sequence of SEQ ID NO:4175, wherein the fourth amino acid is R or V, the seventh amino acid is G or T, the eighth amino acid is G or T, there is no ninth amino acid or is T, the sixteenth amino acid is L or M. In one aspect, provided herein is an antibody that binds TRGDC, comprising a VL CDR1 having an amino acid sequence of SEQ ID NO:4176, wherein the fourth amino acid is A or S; a VL CDR2 having an amino acid sequence of SEQ ID NO:4177; and a VL CDR3 having an amino acid sequence of SEQ ID NO:4178. In one aspect, provided herein is an antibody that binds TRGDC, comprising a VH CDR1 having an amino acid sequence of SEQ ID NO:4173, wherein the first amino acid is G or R, the fourth amino acid is F or L, the sixth amino acid is N or S; a VH CDR2 having an amino acid sequence of SEQ ID NO:4174; a VH CDR3 having an amino acid sequence of SEQ ID NO:4175, wherein the fourth amino acid is R or V, the seventh amino acid is G or T, the eighth amino acid is G or T, there is no ninth amino acid or is T, the sixteenth amino acid is L or M; a VL CDR1 having an amino acid sequence of SEQ ID NO:4176, wherein the fourth amino acid is A or S; a VL CDR2 having an amino acid sequence of SEQ ID NO:4177; and a VL CDR3 having an amino acid sequence of SEQ ID NO:4178.

[0257] In one aspect, provided herein is an antibody that binds TRGDC, comprising a VH CDR1 having an amino acid sequence of SEQ ID NO:4479, wherein the third amino acid is S or T, the sixth amino acid is N or S; a VH CDR2 having an amino acid sequence of SEQ ID NO:4480, wherein the fourth amino acid is I or F, the sixth amino acid is G or S, the seventh amino acid is A or T, the eighth amino acid is A, G, or P; a VH CDR3 having an amino acid sequence of SEQ ID NO:4481, wherein the first amino acid is S or no amino acid in this position, the second amino acid is S, T, or no amino acid in this position, the third amino acid is A, G, or S, the fourth amino acid is G, N, or T, the fifth amino acid is A, G, or S, the sixth amino acid is G, T, or Y, the seventh amino acid is G, T, or V, the eighth amino acid is D, T, or Y, the ninth amino acid is T or Y, the fifteenth amino acid is I or M, the sixteenth amino acid is D or N. In one aspect, provided herein is an antibody that binds TRGDC, comprising a VL CDR1 having an amino acid sequence of SEQ ID NO:4482; a VL CDR2 having an amino acid sequence of SEQ ID NO:4483, wherein the first amino acid is E or K, the third amino acid is F or S; and a VL CDR3 having an amino acid sequence of SEQ ID NO:4484, wherein the fifth amino acid is E or Q. In one aspect, provided herein is an antibody that binds TRGDC, comprising a VH CDR1 having an amino acid sequence of SEQ ID NO:4479, wherein the third amino acid is S or T, the sixth amino acid is N or S; a VH CDR2 having an amino acid sequence of SEQ ID NO:4480, wherein the fourth amino acid is I or F, the sixth amino acid is G or S, the seventh amino acid is A or T, the eighth amino acid is A, G, or P; a VH CDR3 having an amino acid sequence of SEQ ID NO:4481, wherein the first amino acid is S or no amino acid in this position, the second amino acid is S, T, or no amino acid in this position, the third amino acid is A, G, or S, the fourth amino acid is G, N, or T, the fifth amino acid is A, G, or S, the sixth amino acid is G, T, or Y, the seventh amino acid is G, T, or V, the eighth amino acid is D, T, or Y, the ninth amino acid is T or Y, the fifteenth amino acid is I or M, the sixteenth amino acid is D or N; a VL CDR1 having an amino acid sequence of SEQ ID NO:4482; a VL CDR2 having an amino acid sequence of SEQ ID NO:4483, wherein the first amino acid is E or K, the third amino acid is F or S; and a VL CDR3 having an amino acid sequence of SEQ ID NO:4484, wherein the fifth amino acid is E or Q.

[0258] In one aspect, provided herein is an antibody that binds TRGDC, comprising a VH CDR1 having an amino acid sequence of SEQ ID NO:4241; a VH CDR2 having an amino acid sequence of SEQ ID NO:4242, wherein the seventh amino acid is A or Y; a VH CDR3 having an amino acid sequence of SEQ ID NO:4243, wherein the third amino acid is E or L, the ninth amino acid is I or V. In one aspect, provided herein is an antibody that binds TRGDC, comprising a VL CDR1 having an amino acid sequence of SEQ ID NO:4244, wherein the first amino acid is N or S, the fourth amino acid is N or S; a VL CDR2 having an amino acid sequence of SEQ ID NO:4245; and a VL CDR3 having an amino acid sequence of SEQ ID NO:4246, wherein the fifth amino acid is N or S, the tenth amino acid is V or W. In one aspect, provided herein is an antibody that binds TRGDC, comprising a VH CDR1 having an amino acid sequence of SEQ ID NO:4241; a VH CDR2 having an amino acid sequence of SEQ ID NO:4242, wherein the seventh amino acid is A or Y; a VH CDR3 having an amino acid sequence of SEQ ID NO:4243, wherein the third amino acid is E or L, the ninth amino acid is I or V; a VL CDR1 having an amino acid sequence of SEQ ID NO:4244, wherein the first amino acid is N or S, the fourth amino acid is N or S; a VL CDR2 having an amino acid sequence of SEQ ID NO:4245; and a VL CDR3 having an amino acid sequence of SEQ ID NO:4246, wherein the fifth amino acid is N or S, the tenth amino acid is V or W.

[0259] In another aspect, provided herein is a multispecific antibody that binds TRGV9. In some embodiments, the multispecific antibody is a bispecific antibody. In some embodiments, the multispecific antibody is a trispecific antibody. In some embodiments, the multispecific antibody is a quadraspecific antibody. In one embodiment, the multispecific TRGV9 antibody comprises: (a) a first binding domain that binds TRGV9, and (b) a second binding domain that binds to a second target. In one embodiment, the multispecific TRGV9 antibody comprises: (a) a first binding domain that binds TRGV9, and (b) a second binding domain that binds to a second target, and (c) a third binding domain that binds to a third target. In one embodiment, the multispecific TRGV9 antibody comprises: (a) a first binding domain that binds TRGV9, and (b) a second binding domain that binds to a second target, (c) a third binding domain that binds to a third target, and (d) a fourth binding domain that binds to a fourth target.

[0260] In one embodiment, the first binding domain that binds TRGV9 comprises: a VH comprising a VH CDR1, a VH CDR2, and a VH CDR3 having an amino acid sequence of a VH CDR1, a VH CDR2, and a VH CDR3, respectively, of a VH having an amino acid sequence of SEQ ID NO:31. In one embodiment, the first binding domain that binds TRGV9 comprises: a VL comprising a VL CDR1, a VL CDR2, and a VL CDR3 having an amino acid sequence of a VL CDR1, a VL CDR2, and a VL CDR3, respectively, of a VL having an amino acid sequence of SEQ ID NO:32. In one embodiment, the first binding domain that binds TRGV9 comprises: a VH comprising a VH CDR1, a VH CDR2, and a VH CDR3 having an amino acid sequence of a VH CDR1, a VH CDR2, and a VH CDR3, respectively, of a VH having an amino acid sequence of SEQ ID NO:31; and a VL comprising a VL CDR1, a VL CDR2, and a VL CDR3 having an amino acid sequence of a VL CDR1, a VL CDR2, and a VL CDR3, respectively, of a VL having an amino acid sequence of SEQ ID NO:32. In one embodiment, the first binding domain that binds TRGV9 comprises: a VH comprising a VH CDR1, a VH CDR2, and a VH CDR3 having an amino acid sequence of a VH CDR1, a VH CDR2, and a VH CDR3, respectively, of a VH having an amino acid sequence of SEQ ID NO:65. In one embodiment, the first binding domain that binds TRGV9 comprises: a VL comprising a VL CDR1, a VL CDR2, and a VL CDR3 having an amino acid sequence of a VL CDR1, a VL CDR2, and a VL CDR3, respectively, of a VL having an amino acid sequence of SEQ ID NO:66. In one embodiment, the first binding domain that binds TRGV9 comprises: a VH comprising a VH CDR1, a VH CDR2, and a VH CDR3 having an amino acid sequence of a VH CDR1, a VH CDR2, and a VH CDR3, respectively, of a VH having an amino acid sequence of SEQ ID NO:65; and a VL comprising a VL CDR1, a VL CDR2, and a VL CDR3 having an amino acid sequence of a VL CDR1, a VL CDR2, and a VL CDR3, respectively, of a VL having an amino acid sequence of SEQ ID NO:66. In one embodiment, the first binding domain that binds TRGV9 comprises: a VH comprising a VH CDR1, a VH CDR2, and a VH CDR3 having an amino acid sequence of a VH CDR1, a VH CDR2, and a VH CDR3, respectively, of a VH having an amino acid sequence of SEQ ID NO:99. In one embodiment, the first binding domain that binds TRGV9 comprises: a VL comprising a VL CDR1, a VL CDR2, and a VL CDR3 having an amino acid sequence of a VL CDR1, a VL CDR2, and a VL CDR3, respectively, of a VL having an amino acid sequence of SEQ ID NO:100. In one embodiment, the first binding domain that binds TRGV9 comprises: a VH comprising a VH CDR1, a VH CDR2, and a VH CDR3 having an amino acid sequence of a VH CDR1, a VH CDR2, and a VH CDR3, respectively, of a VH having an amino acid sequence of SEQ ID NO:99; and a VL comprising a VL CDR1, a VL CDR2, and a VL CDR3 having an amino acid sequence of a VL CDR1, a VL CDR2, and a VL CDR3, respectively, of a VL having an amino acid sequence of SEQ ID NO:100. In one embodiment, the first binding domain that binds TRGV9 comprises: a VH comprising a VH CDR1, a VH CDR2, and a VH CDR3 having an amino acid sequence of a VH CDR1, a VH CDR2, and a VH CDR3, respectively, of a VH having an amino acid sequence of SEQ ID NO:133. In one embodiment, the first binding domain that binds TRGV9 comprises: a VL comprising a VL CDR1, a VL CDR2, and a VL CDR3 having an amino acid sequence of a VL CDR1, a VL CDR2, and a VL CDR3, respectively, of a VL having an amino acid sequence of SEQ ID NO:134. In one embodiment, the first binding domain that binds TRGV9 comprises: a VH comprising a VH CDR1, a VH CDR2, and a VH CDR3 having an amino acid sequence of a VH CDR1, a VH CDR2, and a VH CDR3, respectively, of a VH having an amino acid sequence of SEQ ID NO:133; and a VL comprising a VL CDR1, a VL CDR2, and a VL CDR3 having an amino acid sequence of a VL CDR1, a VL CDR2, and a VL CDR3, respectively, of a VL having an amino acid sequence of SEQ ID NO:134. In one embodiment, the first binding domain that binds TRGV9 comprises: a VH comprising a VH CDR1, a VH CDR2, and a VH CDR3 having an amino acid sequence of a VH CDR1, a VH CDR2, and a VH CDR3, respectively, of a VH having an amino acid sequence of SEQ ID NO:167. In one embodiment, the first binding domain that binds TRGV9 comprises: a VL comprising a VL CDR1, a VL CDR2, and a VL CDR3 having an amino acid sequence of a VL CDR1, a VL CDR2, and a VL CDR3, respectively, of a VL having an amino acid sequence of SEQ ID NO:168. In one embodiment, the first binding domain that binds TRGV9 comprises: a VH comprising a VH CDR1, a VH CDR2, and a VH CDR3 having an amino acid sequence of a VH CDR1, a VH CDR2, and a VH CDR3, respectively, of a VH having an amino acid sequence of SEQ ID NO:167; and a VL comprising a VL CDR1, a VL CDR2, and a VL CDR3 having an amino acid sequence of a VL CDR1, a VL CDR2, and a VL CDR3, respectively, of a VL having an amino acid sequence of SEQ ID NO:168. In one embodiment, the first binding domain that binds TRGV9 comprises: a VH comprising a VH CDR1, a VH CDR2, and a VH CDR3 having an amino acid sequence of a VH CDR1, a VH CDR2, and a VH CDR3, respectively, of a VH having an amino acid sequence of SEQ ID NO:201. In one embodiment, the first binding domain that binds TRGV9 comprises: a VL comprising a VL CDR1, a VL CDR2, and a VL CDR3 having an amino acid sequence of a VL CDR1, a VL CDR2, and a VL CDR3, respectively, of a VL having an amino acid sequence of SEQ ID NO:202. In one embodiment, the first binding domain that binds TRGV9 comprises: a VH comprising a VH CDR1, a VH CDR2, and a VH CDR3 having an amino acid sequence of a VH CDR1, a VH CDR2, and a VH CDR3, respectively, of a VH having an amino acid sequence of SEQ ID NO:201; and a VL comprising a VL CDR1, a VL CDR2, and a VL CDR3 having an amino acid sequence of a VL CDR1, a VL CDR2, and a VL CDR3, respectively, of a VL having an amino acid sequence of SEQ ID NO:202. In one embodiment, the first binding domain that binds TRGV9 comprises: a VH comprising a VH CDR1, a VH CDR2, and a VH CDR3 having an amino acid sequence of a VH CDR1, a VH CDR2, and a VH CDR3, respectively, of a VH having an amino acid sequence of SEQ ID NO:235. In one embodiment, the first binding domain that binds TRGV9 comprises: a VL comprising a VL CDR1, a VL CDR2, and a VL CDR3 having an amino acid sequence of a VL CDR1, a VL CDR2, and a VL CDR3, respectively, of a VL having an amino acid sequence of SEQ ID NO:236. In one embodiment, the first binding domain that binds TRGV9 comprises: a VH comprising a VH CDR1, a VH CDR2, and a VH CDR3 having an amino acid sequence of a VH CDR1, a VH CDR2, and a VH CDR3, respectively, of a VH having an amino acid sequence of SEQ ID NO:235; and a VL comprising a VL CDR1, a VL CDR2, and a VL CDR3 having an amino acid sequence of a VL CDR1, a VL CDR2, and a VL CDR3, respectively, of a VL having an amino acid sequence of SEQ ID NO:236. In one embodiment, the first binding domain that binds TRGV9 comprises: a VH comprising a VH CDR1, a VH CDR2, and a VH CDR3 having an amino acid sequence of a VH CDR1, a VH CDR2, and a VH CDR3, respectively, of a VH having an amino acid sequence of SEQ ID NO:269. In one embodiment, the first binding domain that binds TRGV9 comprises: a VL comprising a VL CDR1, a VL CDR2, and a VL CDR3 having an amino acid sequence of a VL CDR1, a VL CDR2, and a VL CDR3, respectively, of a VL having an amino acid sequence of SEQ ID NO:270. In one embodiment, the first binding domain that binds TRGV9 comprises: a VH comprising a VH CDR1, a VH CDR2, and a VH CDR3 having an amino acid sequence of a VH CDR1, a VH CDR2, and a VH CDR3, respectively, of a VH having an amino acid sequence of SEQ ID NO:269; and a VL comprising a VL CDR1, a VL CDR2, and a VL CDR3 having an amino acid sequence of a VL CDR1, a VL CDR2, and a VL CDR3, respectively, of a VL having an amino acid sequence of SEQ ID NO:270. In one embodiment, the first binding domain that binds TRGV9 comprises: a VH comprising a VH CDR1, a VH CDR2, and a VH CDR3 having an amino acid sequence of a VH CDR1, a VH CDR2, and a VH CDR3, respectively, of a VH having an amino acid sequence of SEQ ID NO:303. In one embodiment, the first binding domain that binds TRGV9 comprises: a VL comprising a VL CDR1, a VL CDR2, and a VL CDR3 having an amino acid sequence of a VL CDR1, a VL CDR2, and a VL CDR3, respectively, of a VL having an amino acid sequence of SEQ ID NO:304. In one embodiment, the first binding domain that binds TRGV9 comprises: a VH comprising a VH CDR1, a VH CDR2, and a VH CDR3 having an amino acid sequence of a VH CDR1, a VH CDR2, and a VH CDR3, respectively, of a VH having an amino acid sequence of SEQ ID NO:303; and a VL comprising a VL CDR1, a VL CDR2, and a VL CDR3 having an amino acid sequence of a VL CDR1, a VL CDR2, and a VL CDR3, respectively, of a VL having an amino acid sequence of SEQ ID NO:304. In one embodiment, the first binding domain that binds TRGV9 comprises: a VH comprising a VH CDR1, a VH CDR2, and a VH CDR3 having an amino acid sequence of a VH CDR1, a VH CDR2, and a VH CDR3, respectively, of a VH having an amino acid sequence of SEQ ID NO:337. In one embodiment, the first binding domain that binds TRGV9 comprises: a VL comprising a VL CDR1, a VL CDR2, and a VL CDR3 having an amino acid sequence of a VL CDR1, a VL CDR2, and a VL CDR3, respectively, of a VL having an amino acid sequence of SEQ ID NO:338. In one embodiment, the first binding domain that binds TRGV9 comprises: a VH comprising a VH CDR1, a VH CDR2, and a VH CDR3 having an amino acid sequence of a VH CDR1, a VH CDR2, and a VH CDR3, respectively, of a VH having an amino acid sequence of SEQ ID NO:337; and a VL comprising a VL CDR1, a VL CDR2, and a VL CDR3 having an amino acid sequence of a VL CDR1, a VL CDR2, and a VL CDR3, respectively, of a VL having an amino acid sequence of SEQ ID NO:338. In one embodiment, the first binding domain that binds TRGV9 comprises: a VH comprising a VH CDR1, a VH CDR2, and a VH CDR3 having an amino acid sequence of a VH CDR1, a VH CDR2, and a VH CDR3, respectively, of a VH having an amino acid sequence of SEQ ID NO:371. In one embodiment, the first binding domain that binds TRGV9 comprises: a VL comprising a VL CDR1, a VL CDR2, and a VL CDR3 having an amino acid sequence of a VL CDR1, a VL CDR2, and a VL CDR3, respectively, of a VL having an amino acid sequence of SEQ ID NO:372. In one embodiment, the first binding domain that binds TRGV9 comprises: a VH comprising a VH CDR1, a VH CDR2, and a VH CDR3 having an amino acid sequence of a VH CDR1, a VH CDR2, and a VH CDR3, respectively, of a VH having an amino acid sequence of SEQ ID NO:371; and a VL comprising a VL CDR1, a VL CDR2, and a VL CDR3 having an amino acid sequence of a VL CDR1, a VL CDR2, and a VL CDR3, respectively, of a VL having an amino acid sequence of SEQ ID NO:372. In one embodiment, the first binding domain that binds TRGV9 comprises: a VH comprising a VH CDR1, a VH CDR2, and a VH CDR3 having an amino acid sequence of a VH CDR1, a VH CDR2, and a VH CDR3, respectively, of a VH having an amino acid sequence of SEQ ID NO:405. In one embodiment, the first binding domain that binds TRGV9 comprises: a VL comprising a VL CDR1, a VL CDR2, and a VL CDR3 having an amino acid sequence of a VL CDR1, a VL CDR2, and a VL CDR3, respectively, of a VL having an amino acid sequence of SEQ ID NO:406. In one embodiment, the first binding domain that binds TRGV9 comprises: a VH comprising a VH CDR1, a VH CDR2, and a VH CDR3 having an amino acid sequence of a VH CDR1, a VH CDR2, and a VH CDR3, respectively, of a VH having an amino acid sequence of SEQ ID NO:405; and a VL comprising a VL CDR1, a VL CDR2, and a VL CDR3 having an amino acid sequence of a VL CDR1, a VL CDR2, and a VL CDR3, respectively, of a VL having an amino acid sequence of SEQ ID NO:406. In one embodiment, the first binding domain that binds TRGV9 comprises: a VH comprising a VH CDR1, a VH CDR2, and a VH CDR3 having an amino acid sequence of a VH CDR1, a VH CDR2, and a VH CDR3, respectively, of a VH having an amino acid sequence of SEQ ID NO:439. In one embodiment, the first binding domain that binds TRGV9 comprises: a VL comprising a VL CDR1, a VL CDR2, and a VL CDR3 having an amino acid sequence of a VL CDR1, a VL CDR2, and a VL CDR3, respectively, of a VL having an amino acid sequence of SEQ ID NO:440. In one embodiment, the first binding domain that binds TRGV9 comprises: a VH comprising a VH CDR1, a VH CDR2, and a VH CDR3 having an amino acid sequence of a VH CDR1, a VH CDR2, and a VH CDR3, respectively, of a VH having an amino acid sequence of SEQ ID NO:439; and a VL comprising a VL CDR1, a VL CDR2, and a VL CDR3 having an amino acid sequence of a VL CDR1, a VL CDR2, and a VL CDR3, respectively, of a VL having an amino acid sequence of SEQ ID NO:440. In one embodiment, the first binding domain that binds TRGV9 comprises: a VH comprising a VH CDR1, a VH CDR2, and a VH CDR3 having an amino acid sequence of a VH CDR1, a VH CDR2, and a VH CDR3, respectively, of a VH having an amino acid sequence of SEQ ID NO:473. In one embodiment, the first binding domain that binds TRGV9 comprises: a VL comprising a VL CDR1, a VL CDR2, and a VL CDR3 having an amino acid sequence of a VL CDR1, a VL CDR2, and a VL CDR3, respectively, of a VL having an amino acid sequence of SEQ ID NO:474. In one embodiment, the first binding domain that binds TRGV9 comprises: a VH comprising a VH CDR1, a VH CDR2, and a VH CDR3 having an amino acid sequence of a VH CDR1, a VH CDR2, and a VH CDR3, respectively, of a VH having an amino acid sequence of SEQ ID NO:473; and a VL comprising a VL CDR1, a VL CDR2, and a VL CDR3 having an amino acid sequence of a VL CDR1, a VL CDR2, and a VL CDR3, respectively, of a VL having an amino acid sequence of SEQ ID NO:474. In one embodiment, the first binding domain that binds TRGV9 comprises: a VH comprising a VH CDR1, a VH CDR2, and a VH CDR3 having an amino acid sequence of a VH CDR1, a VH CDR2, and a VH CDR3, respectively, of a VH having an amino acid sequence of SEQ ID NO:507. In one embodiment, the first binding domain that binds TRGV9 comprises: a VL comprising a VL CDR1, a VL CDR2, and a VL CDR3 having an amino acid sequence of a VL CDR1, a VL CDR2, and a VL CDR3, respectively, of a VL having an amino acid sequence of SEQ ID NO:508. In one embodiment, the first binding domain that binds TRGV9 comprises: a VH comprising a VH CDR1, a VH CDR2, and a VH CDR3 having an amino acid sequence of a VH CDR1, a VH CDR2, and a VH CDR3, respectively, of a VH having an amino acid sequence of SEQ ID NO:507; and a VL comprising a VL CDR1, a VL CDR2, and a VL CDR3 having an amino acid sequence of a VL CDR1, a VL CDR2, and a VL CDR3, respectively, of a VL having an amino acid sequence of SEQ ID NO:508. In one embodiment, the first binding domain that binds TRGV9 comprises: a VH comprising a VH CDR1, a VH CDR2, and a VH CDR3 having an amino acid sequence of a VH CDR1, a VH CDR2, and a VH CDR3, respectively, of a VH having an amino acid sequence of SEQ ID NO:541. In one embodiment, the first binding domain that binds TRGV9 comprises: a VL comprising a VL CDR1, a VL CDR2, and a VL CDR3 having an amino acid sequence of a VL CDR1, a VL CDR2, and a VL CDR3, respectively, of a VL having an amino acid sequence of SEQ ID NO:542. In one embodiment, the first binding domain that binds TRGV9 comprises: a VH comprising a VH CDR1, a VH CDR2, and a VH CDR3 having an amino acid sequence of a VH CDR1, a VH CDR2, and a VH CDR3, respectively, of a VH having an amino acid sequence of SEQ ID NO:541; and a VL comprising a VL CDR1, a VL CDR2, and a VL CDR3 having an amino acid sequence of a VL CDR1, a VL CDR2, and a VL CDR3, respectively, of a VL having an amino acid sequence of SEQ ID NO:542. In one embodiment, the first binding domain that binds TRGV9 comprises: a VH comprising a VH CDR1, a VH CDR2, and a VH CDR3 having an amino acid sequence of a VH CDR1, a VH CDR2, and a VH CDR3, respectively, of a VH having an amino acid sequence of SEQ ID NO:575. In one embodiment, the first binding domain that binds TRGV9 comprises: a VL comprising a VL CDR1, a VL CDR2, and a VL CDR3 having an amino acid sequence of a VL CDR1, a VL CDR2, and a VL CDR3, respectively, of a VL having an amino acid sequence of SEQ ID NO:576. In one embodiment, the first binding domain that binds TRGV9 comprises: a VH comprising a VH CDR1, a VH CDR2, and a VH CDR3 having an amino acid sequence of a VH CDR1, a VH CDR2, and a VH CDR3, respectively, of a VH having an amino acid sequence of SEQ ID NO:575; and a VL comprising a VL CDR1, a VL CDR2, and a VL CDR3 having an amino acid sequence of a VL CDR1, a VL CDR2, and a VL CDR3, respectively, of a VL having an amino acid sequence of SEQ ID NO:576. In one embodiment, the first binding domain that binds TRGV9 comprises: a VH comprising a VH CDR1, a VH CDR2, and a VH CDR3 having an amino acid sequence of a VH CDR1, a VH CDR2, and a VH CDR3, respectively, of a VH having an amino acid sequence of SEQ ID NO:609. In one embodiment, the first binding domain that binds TRGV9 comprises: a VL comprising a VL CDR1, a VL CDR2, and a VL CDR3 having an amino acid sequence of a VL CDR1, a VL CDR2, and a VL CDR3, respectively, of a VL having an amino acid sequence of SEQ ID NO:610. In one embodiment, the first binding domain that binds TRGV9 comprises: a VH comprising a VH CDR1, a VH CDR2, and a VH CDR3 having an amino acid sequence of a VH CDR1, a VH CDR2, and a VH CDR3, respectively, of a VH having an amino acid sequence of SEQ ID NO:609; and a VL comprising a VL CDR1, a VL CDR2, and a VL CDR3 having an amino acid sequence of a VL CDR1, a VL CDR2, and a VL CDR3, respectively, of a VL having an amino acid sequence of SEQ ID NO:610. In one embodiment, the first binding domain that binds TRGV9 comprises: a VH comprising a VH CDR1, a VH CDR2, and a VH CDR3 having an amino acid sequence of a VH CDR1, a VH CDR2, and a VH CDR3, respectively, of a VH having an amino acid sequence of SEQ ID NO:643. In one embodiment, the first binding domain that binds TRGV9 comprises: a VL comprising a VL CDR1, a VL CDR2, and a VL CDR3 having an amino acid sequence of a VL CDR1, a VL CDR2, and a VL CDR3, respectively, of a VL having an amino acid sequence of SEQ ID NO:644. In one embodiment, the first binding domain that binds TRGV9 comprises: a VH comprising a VH CDR1, a VH CDR2, and a VH CDR3 having an amino acid sequence of a VH CDR1, a VH CDR2, and a VH CDR3, respectively, of a VH having an amino acid sequence of SEQ ID NO:643; and a VL comprising a VL CDR1, a VL CDR2, and a VL CDR3 having an amino acid sequence of a VL CDR1, a VL CDR2, and a VL CDR3, respectively, of a VL having an amino acid sequence of SEQ ID NO:644. In one embodiment, the first binding domain that binds TRGV9 comprises: a VH comprising a VH CDR1, a VH CDR2, and a VH CDR3 having an amino acid sequence of a VH CDR1, a VH CDR2, and a VH CDR3, respectively, of a VH having an amino acid sequence of SEQ ID NO:677. In one embodiment, the first binding domain that binds TRGV9 comprises: a VL comprising a VL CDR1, a VL CDR2, and a VL CDR3 having an amino acid sequence of a VL CDR1, a VL CDR2, and a VL CDR3, respectively, of a VL having an amino acid sequence of SEQ ID NO:678. In one embodiment, the first binding domain that binds TRGV9 comprises: a VH comprising a VH CDR1, a VH CDR2, and a VH CDR3 having an amino acid sequence of a VH CDR1, a VH CDR2, and a VH CDR3, respectively, of a VH having an amino acid sequence of SEQ ID NO:677; and a VL comprising a VL CDR1, a VL CDR2, and a VL CDR3 having an amino acid sequence of a VL CDR1, a VL CDR2, and a VL CDR3, respectively, of a VL having an amino acid sequence of SEQ ID NO:678. In one embodiment, the first binding domain that binds TRGV9 comprises: a VH comprising a VH CDR1, a VH CDR2, and a VH CDR3 having an amino acid sequence of a VH CDR1, a VH CDR2, and a VH CDR3, respectively, of a VH having an amino acid sequence of SEQ ID NO:711. In one embodiment, the first binding domain that binds TRGV9 comprises: a VL comprising a VL CDR1, a VL CDR2, and a VL CDR3 having an amino acid sequence of a VL CDR1, a VL CDR2, and a VL CDR3, respectively, of a VL having an amino acid sequence of SEQ ID NO:712. In one embodiment, the first binding domain that binds TRGV9 comprises: a VH comprising a VH CDR1, a VH CDR2, and a VH CDR3 having an amino acid sequence of a VH CDR1, a VH CDR2, and a VH CDR3, respectively, of a VH having an amino acid sequence of SEQ ID NO:711; and a VL comprising a VL CDR1, a VL CDR2, and a VL CDR3 having an amino acid sequence of a VL CDR1, a VL CDR2, and a VL CDR3, respectively, of a VL having an amino acid sequence of SEQ ID NO:712. In one embodiment, the first binding domain that binds TRGV9 comprises: a VH comprising a VH CDR1, a VH CDR2, and a VH CDR3 having an amino acid sequence of a VH CDR1, a VH CDR2, and a VH CDR3, respectively, of a VH having an amino acid sequence of SEQ ID NO:745. In one embodiment, the first binding domain that binds TRGV9 comprises: a VL comprising a VL CDR1, a VL CDR2, and a VL CDR3 having an amino acid sequence of a VL CDR1, a VL CDR2, and a VL CDR3, respectively, of a VL having an amino acid sequence of SEQ ID NO:746. In one embodiment, the first binding domain that binds TRGV9 comprises: a VH comprising a VH CDR1, a VH CDR2, and a VH CDR3 having an amino acid sequence of a VH CDR1, a VH CDR2, and a VH CDR3, respectively, of a VH having an amino acid sequence of SEQ ID NO:745; and a VL comprising a VL CDR1, a VL CDR2, and a VL CDR3 having an amino acid sequence of a VL CDR1, a VL CDR2, and a VL CDR3, respectively, of a VL having an amino acid sequence of SEQ ID NO:746. In one embodiment, the first binding domain that binds TRGV9 comprises: a VH comprising a VH CDR1, a VH CDR2, and a VH CDR3 having an amino acid sequence of a VH CDR1, a VH CDR2, and a VH CDR3, respectively, of a VH having an amino acid sequence of SEQ ID NO:779. In one embodiment, the first binding domain that binds TRGV9 comprises: a VL comprising a VL CDR1, a VL CDR2, and a VL CDR3 having an amino acid sequence of a VL CDR1, a VL CDR2, and a VL CDR3, respectively, of a VL having an amino acid sequence of SEQ ID NO:780. In one embodiment, the first binding domain that binds TRGV9 comprises: a VH comprising a VH CDR1, a VH CDR2, and a VH CDR3 having an amino acid sequence of a VH CDR1, a VH CDR2, and a VH CDR3, respectively, of a VH having an amino acid sequence of SEQ ID NO:779; and a VL comprising a VL CDR1, a VL CDR2, and a VL CDR3 having an amino acid sequence of a VL CDR1, a VL CDR2, and a VL CDR3, respectively, of a VL having an amino acid sequence of SEQ ID NO:780. In one embodiment, the first binding domain that binds TRGV9 comprises: a VH comprising a VH CDR1, a VH CDR2, and a VH CDR3 having an amino acid sequence of a VH CDR1, a VH CDR2, and a VH CDR3, respectively, of a VH having an amino acid sequence of SEQ ID NO:813. In one embodiment, the first binding domain that binds TRGV9 comprises: a VL comprising a VL CDR1, a VL CDR2, and a VL CDR3 having an amino acid sequence of a VL CDR1, a VL CDR2, and a VL CDR3, respectively, of a VL having an amino acid sequence of SEQ ID NO:814. In one embodiment, the first binding domain that binds TRGV9 comprises: a VH comprising a VH CDR1, a VH CDR2, and a VH CDR3 having an amino acid sequence of a VH CDR1, a VH CDR2, and a VH CDR3, respectively, of a VH having an amino acid sequence of SEQ ID NO:813; and a VL comprising a VL CDR1, a VL CDR2, and a VL CDR3 having an amino acid sequence of a VL CDR1, a VL CDR2, and a VL CDR3, respectively, of a VL having an amino acid sequence of SEQ ID NO:814. In one embodiment, the first binding domain that binds TRGV9 comprises: a VH comprising a VH CDR1, a VH CDR2, and a VH CDR3 having an amino acid sequence of a VH CDR1, a VH CDR2, and a VH CDR3, respectively, of a VH having an amino acid sequence of SEQ ID NO:847. In one embodiment, the first binding domain that binds TRGV9 comprises: a VL comprising a VL CDR1, a VL CDR2, and a VL CDR3 having an amino acid sequence of a VL CDR1, a VL CDR2, and a VL CDR3, respectively, of a VL having an amino acid sequence of SEQ ID NO:848. In one embodiment, the first binding domain that binds TRGV9 comprises: a VH comprising a VH CDR1, a VH CDR2, and a VH CDR3 having an amino acid sequence of a VH CDR1, a VH CDR2, and a VH CDR3, respectively, of a VH having an amino acid sequence of SEQ ID NO:847; and a VL comprising a VL CDR1, a VL CDR2, and a VL CDR3 having an amino acid sequence of a VL CDR1, a VL CDR2, and a VL CDR3, respectively, of a VL having an amino acid sequence of SEQ ID NO:848. In one embodiment, the first binding domain that binds TRGV9 comprises: a VH comprising a VH CDR1, a VH CDR2, and a VH CDR3 having an amino acid sequence of a VH CDR1, a VH CDR2, and a VH CDR3, respectively, of a VH having an amino acid sequence of SEQ ID NO:881. In one embodiment, the first binding domain that binds TRGV9 comprises: a VL comprising a VL CDR1, a VL CDR2, and a VL CDR3 having an amino acid sequence of a VL CDR1, a VL CDR2, and a VL CDR3, respectively, of a VL having an amino acid sequence of SEQ ID NO:882. In one embodiment, the first binding domain that binds TRGV9 comprises: a VH comprising a VH CDR1, a VH CDR2, and a VH CDR3 having an amino acid sequence of a VH CDR1, a VH CDR2, and a VH CDR3, respectively, of a VH having an amino acid sequence of SEQ ID NO:881; and a VL comprising a VL CDR1, a VL CDR2, and a VL CDR3 having an amino acid sequence of a VL CDR1, a VL CDR2, and a VL CDR3, respectively, of a VL having an amino acid sequence of SEQ ID NO:882. In one embodiment, the first binding domain that binds TRGV9 comprises: a VH comprising a VH CDR1, a VH CDR2, and a VH CDR3 having an amino acid sequence of a VH CDR1, a VH CDR2, and a VH CDR3, respectively, of a VH having an amino acid sequence of SEQ ID NO:915. In one embodiment, the first binding domain that binds TRGV9 comprises: a VL comprising a VL CDR1, a VL CDR2, and a VL CDR3 having an amino acid sequence of a VL CDR1, a VL CDR2, and a VL CDR3, respectively, of a VL having an amino acid sequence of SEQ ID NO:916. In one embodiment, the first binding domain that binds TRGV9 comprises: a VH comprising a VH CDR1, a VH CDR2, and a VH CDR3 having an amino acid sequence of a VH CDR1, a VH CDR2, and a VH CDR3, respectively, of a VH having an amino acid sequence of SEQ ID NO:915; and a VL comprising a VL CDR1, a VL CDR2, and a VL CDR3 having an amino acid sequence of a VL CDR1, a VL CDR2, and a VL CDR3, respectively, of a VL having an amino acid sequence of SEQ ID NO:916. In one embodiment, the first binding domain that binds TRGV9 comprises: a VH comprising a VH CDR1, a VH CDR2, and a VH CDR3 having an amino acid sequence of a VH CDR1, a VH CDR2, and a VH CDR3, respectively, of a VH having an amino acid sequence of SEQ ID NO:949. In one embodiment, the first binding domain that binds TRGV9 comprises: a VL comprising a VL CDR1, a VL CDR2, and a VL CDR3 having an amino acid sequence of a VL CDR1, a VL CDR2, and a VL CDR3, respectively, of a VL having an amino acid sequence of SEQ ID NO:950. In one embodiment, the first binding domain that binds TRGV9 comprises: a VH comprising a VH CDR1, a VH CDR2, and a VH CDR3 having an amino acid sequence of a VH CDR1, a VH CDR2, and a VH CDR3, respectively, of a VH having an amino acid sequence of SEQ ID NO:949; and a VL comprising a VL CDR1, a VL CDR2, and a VL CDR3 having an amino acid sequence of a VL CDR1, a VL CDR2, and a VL CDR3, respectively, of a VL having an amino acid sequence of SEQ ID NO:950. In one embodiment, the first binding domain that binds TRGV9 comprises: a VH comprising a VH CDR1, a VH CDR2, and a VH CDR3 having an amino acid sequence of a VH CDR1, a VH CDR2, and a VH CDR3, respectively, of a VH having an amino acid sequence of SEQ ID NO:983. In one embodiment, the first binding domain that binds TRGV9 comprises: a VL comprising a VL CDR1, a VL CDR2, and a VL CDR3 having an amino acid sequence of a VL CDR1, a VL CDR2, and a VL CDR3, respectively, of a VL having an amino acid sequence of SEQ ID NO:984. In one embodiment, the first binding domain that binds TRGV9 comprises: a VH comprising a VH CDR1, a VH CDR2, and a VH CDR3 having an amino acid sequence of a VH CDR1, a VH CDR2, and a VH CDR3, respectively, of a VH having an amino acid sequence of SEQ ID NO:983; and a VL comprising a VL CDR1, a VL CDR2, and a VL CDR3 having an amino acid sequence of a VL CDR1, a VL CDR2, and a VL CDR3, respectively, of a VL having an amino acid sequence of SEQ ID NO:984. In one embodiment, the first binding domain that binds TRGV9 comprises: a VH comprising a VH CDR1, a VH CDR2, and a VH CDR3 having an amino acid sequence of a VH CDR1, a VH CDR2, and a VH CDR3, respectively, of a VH having an amino acid sequence of SEQ ID NO:1017. In one embodiment, the first binding domain that binds TRGV9 comprises: a VL comprising a VL CDR1, a VL CDR2, and a VL CDR3 having an amino acid sequence of a VL CDR1, a VL CDR2, and a VL CDR3, respectively, of a VL having an amino acid sequence of SEQ ID NO:1018. In one embodiment, the first binding domain that binds TRGV9 comprises: a VH comprising a VH CDR1, a VH CDR2, and a VH CDR3 having an amino acid sequence of a VH CDR1, a VH CDR2, and a VH CDR3, respectively, of a VH having an amino acid sequence of SEQ ID NO:1017; and a VL comprising a VL CDR1, a VL CDR2, and a VL CDR3 having an amino acid sequence of a VL CDR1, a VL CDR2, and a VL CDR3, respectively, of a VL having an amino acid sequence of SEQ ID NO:1018. In one embodiment, the first binding domain that binds TRGV9 comprises: a VH comprising a VH CDR1, a VH CDR2, and a VH CDR3 having an amino acid sequence of a VH CDR1, a VH CDR2, and a VH CDR3, respectively, of a VH having an amino acid sequence of SEQ ID NO:1051. In one embodiment, the first binding domain that binds TRGV9 comprises: a VL comprising a VL CDR1, a VL CDR2, and a VL CDR3 having an amino acid sequence of a VL CDR1, a VL CDR2, and a VL CDR3, respectively, of a VL having an amino acid sequence of SEQ ID NO:1052. In one embodiment, the first binding domain that binds TRGV9 comprises: a VH comprising a VH CDR1, a VH CDR2, and a VH CDR3 having an amino acid sequence of a VH CDR1, a VH CDR2, and a VH CDR3, respectively, of a VH having an amino acid sequence of SEQ ID NO:1051; and a VL comprising a VL CDR1, a VL CDR2, and a VL CDR3 having an amino acid sequence of a VL CDR1, a VL CDR2, and a VL CDR3, respectively, of a VL having an amino acid sequence of SEQ ID NO:1052. In one embodiment, the first binding domain that binds TRGV9 comprises: a VH comprising a VH CDR1, a VH CDR2, and a VH CDR3 having an amino acid sequence of a VH CDR1, a VH CDR2, and a VH CDR3, respectively, of a VH having an amino acid sequence of SEQ ID NO:1085. In one embodiment, the first binding domain that binds TRGV9 comprises: a VL comprising a VL CDR1, a VL CDR2, and a VL CDR3 having an amino acid sequence of a VL CDR1, a VL CDR2, and a VL CDR3, respectively, of a VL having an amino acid sequence of SEQ ID NO:1086. In one embodiment, the first binding domain that binds TRGV9 comprises: a VH comprising a VH CDR1, a VH CDR2, and a VH CDR3 having an amino acid sequence of a VH CDR1, a VH CDR2, and a VH CDR3, respectively, of a VH having an amino acid sequence of SEQ ID NO:1085; and a VL comprising a VL CDR1, a VL CDR2, and a VL CDR3 having an amino acid sequence of a VL CDR1, a VL CDR2, and a VL CDR3, respectively, of a VL having an amino acid sequence of SEQ ID NO:1086. In one embodiment, the first binding domain that binds TRGV9 comprises: a VH comprising a VH CDR1, a VH CDR2, and a VH CDR3 having an amino acid sequence of a VH CDR1, a VH CDR2, and a VH CDR3, respectively, of a VH having an amino acid sequence of SEQ ID NO:1119. In one embodiment, the first binding domain that binds TRGV9 comprises: a VL comprising a VL CDR1, a VL CDR2, and a VL CDR3 having an amino acid sequence of a VL CDR1, a VL CDR2, and a VL CDR3, respectively, of a VL having an amino acid sequence of SEQ ID NO:1120. In one embodiment, the first binding domain that binds TRGV9 comprises: a VH comprising a VH CDR1, a VH CDR2, and a VH CDR3 having an amino acid sequence of a VH CDR1, a VH CDR2, and a VH CDR3, respectively, of a VH having an amino acid sequence of SEQ ID NO:1119; and a VL comprising a VL CDR1, a VL CDR2, and a VL CDR3 having an amino acid sequence of a VL CDR1, a VL CDR2, and a VL CDR3, respectively, of a VL having an amino acid sequence of SEQ ID NO:1120. In one embodiment, the first binding domain that binds TRGV9 comprises: a VH comprising a VH CDR1, a VH CDR2, and a VH CDR3 having an amino acid sequence of a VH CDR1, a VH CDR2, and a VH CDR3, respectively, of a VH having an amino acid sequence of SEQ ID NO:1153. In one embodiment, the first binding domain that binds TRGV9 comprises: a VL comprising a VL CDR1, a VL CDR2, and a VL CDR3 having an amino acid sequence of a VL CDR1, a VL CDR2, and a VL CDR3, respectively, of a VL having an amino acid sequence of SEQ ID NO:1154. In one embodiment, the first binding domain that binds TRGV9 comprises: a VH comprising a VH CDR1, a VH CDR2, and a VH CDR3 having an amino acid sequence of a VH CDR1, a VH CDR2, and a VH CDR3, respectively, of a VH having an amino acid sequence of SEQ ID NO:1153; and a VL comprising a VL CDR1, a VL CDR2, and a VL CDR3 having an amino acid sequence of a VL CDR1, a VL CDR2, and a VL CDR3, respectively, of a VL having an amino acid sequence of SEQ ID NO:1154. In one embodiment, the first binding domain that binds TRGV9 comprises: a VH comprising a VH CDR1, a VH CDR2, and a VH CDR3 having an amino acid sequence of a VH CDR1, a VH CDR2, and a VH CDR3, respectively, of a VH having an amino acid sequence of SEQ ID NO:1187. In one embodiment, the first binding domain that binds TRGV9 comprises: a VL comprising a VL CDR1, a VL CDR2, and a VL CDR3 having an amino acid sequence of a VL CDR1, a VL CDR2, and a VL CDR3, respectively, of a VL having an amino acid sequence of SEQ ID NO:1188. In one embodiment, the first binding domain that binds TRGV9 comprises: a VH comprising a VH CDR1, a VH CDR2, and a VH CDR3 having an amino acid sequence of a VH CDR1, a VH CDR2, and a VH CDR3, respectively, of a VH having an amino acid sequence of SEQ ID NO:1187; and a VL comprising a VL CDR1, a VL CDR2, and a VL CDR3 having an amino acid sequence of a VL CDR1, a VL CDR2, and a VL CDR3, respectively, of a VL having an amino acid sequence of SEQ ID NO:1188. In one embodiment, the first binding domain that binds TRGV9 comprises: a VH comprising a VH CDR1, a VH CDR2, and a VH CDR3 having an amino acid sequence of a VH CDR1, a VH CDR2, and a VH CDR3, respectively, of a VH having an amino acid sequence of SEQ ID NO:1221. In one embodiment, the first binding domain that binds TRGV9 comprises: a VL comprising a VL CDR1, a VL CDR2, and a VL CDR3 having an amino acid sequence of a VL CDR1, a VL CDR2, and a VL CDR3, respectively, of a VL having an amino acid sequence of SEQ ID NO:1222. In one embodiment, the first binding domain that binds TRGV9 comprises: a VH comprising a VH CDR1, a VH CDR2, and a VH CDR3 having an amino acid sequence of a VH CDR1, a VH CDR2, and a VH CDR3, respectively, of a VH having an amino acid sequence of SEQ ID NO:1221; and a VL comprising a VL CDR1, a VL CDR2, and a VL CDR3 having an amino acid sequence of a VL CDR1, a VL CDR2, and a VL CDR3, respectively, of a VL having an amino acid sequence of SEQ ID NO:1222. In one embodiment, the first binding domain that binds TRGV9 comprises: a VH comprising a VH CDR1, a VH CDR2, and a VH CDR3 having an amino acid sequence of a VH CDR1, a VH CDR2, and a VH CDR3, respectively, of a VH having an amino acid sequence of SEQ ID NO:1255. In one embodiment, the first binding domain that binds TRGV9 comprises: a VL comprising a VL CDR1, a VL CDR2, and a VL CDR3 having an amino acid sequence of a VL CDR1, a VL CDR2, and a VL CDR3, respectively, of a VL having an amino acid sequence of SEQ ID NO:1256. In one embodiment, the first binding domain that binds TRGV9 comprises: a VH comprising a VH CDR1, a VH CDR2, and a VH CDR3 having an amino acid sequence of a VH CDR1, a VH CDR2, and a VH CDR3, respectively, of a VH having an amino acid sequence of SEQ ID NO:1255; and a VL comprising a VL CDR1, a VL CDR2, and a VL CDR3 having an amino acid sequence of a VL CDR1, a VL CDR2, and a VL CDR3, respectively, of a VL having an amino acid sequence of SEQ ID NO:1256. In one embodiment, the first binding domain that binds TRGV9 comprises: a VH comprising a VH CDR1, a VH CDR2, and a VH CDR3 having an amino acid sequence of a VH CDR1, a VH CDR2, and a VH CDR3, respectively, of a VH having an amino acid sequence of SEQ ID NO:1289. In one embodiment, the first binding domain that binds TRGV9 comprises: a VL comprising a VL CDR1, a VL CDR2, and a VL CDR3 having an amino acid sequence of a VL CDR1, a VL CDR2, and a VL CDR3, respectively, of a VL having an amino acid sequence of SEQ ID NO:1290. In one embodiment, the first binding domain that binds TRGV9 comprises: a VH comprising a VH CDR1, a VH CDR2, and a VH CDR3 having an amino acid sequence of a VH CDR1, a VH CDR2, and a VH CDR3, respectively, of a VH having an amino acid sequence of SEQ ID NO:1289; and a VL comprising a VL CDR1, a VL CDR2, and a VL CDR3 having an amino acid sequence of a VL CDR1, a VL CDR2, and a VL CDR3, respectively, of a VL having an amino acid sequence of SEQ ID NO:1290. In one embodiment, the first binding domain that binds TRGV9 comprises: a VH comprising a VH CDR1, a VH CDR2, and a VH CDR3 having an amino acid sequence of a VH CDR1, a VH CDR2, and a VH CDR3, respectively, of a VH having an amino acid sequence of SEQ ID NO:1323. In one embodiment, the first binding domain that binds TRGV9 comprises: a VL comprising a VL CDR1, a VL CDR2, and a VL CDR3 having an amino acid sequence of a VL CDR1, a VL CDR2, and a VL CDR3, respectively, of a VL having an amino acid sequence of SEQ ID NO:1324. In one embodiment, the first binding domain that binds TRGV9 comprises: a VH comprising a VH CDR1, a VH CDR2, and a VH CDR3 having an amino acid sequence of a VH CDR1, a VH CDR2, and a VH CDR3, respectively, of a VH having an amino acid sequence of SEQ ID NO:1323; and a VL comprising a VL CDR1, a VL CDR2, and a VL CDR3 having an amino acid sequence of a VL CDR1, a VL CDR2, and a VL CDR3, respectively, of a VL having an amino acid sequence of SEQ ID NO:1324. In one embodiment, the first binding domain that binds TRGV9 comprises: a VH comprising a VH CDR1, a VH CDR2, and a VH CDR3 having an amino acid sequence of a VH CDR1, a VH CDR2, and a VH CDR3, respectively, of a VH having an amino acid sequence of SEQ ID NO:1357. In one embodiment, the first binding domain that binds TRGV9 comprises: a VL comprising a VL CDR1, a VL CDR2, and a VL CDR3 having an amino acid sequence of a VL CDR1, a VL CDR2, and a VL CDR3, respectively, of a VL having an amino acid sequence of SEQ ID NO:1358. In one embodiment, the first binding domain that binds TRGV9 comprises: a VH comprising a VH CDR1, a VH CDR2, and a VH CDR3 having an amino acid sequence of a VH CDR1, a VH CDR2, and a VH CDR3, respectively, of a VH having an amino acid sequence of SEQ ID NO:1357; and a VL comprising a VL CDR1, a VL CDR2, and a VL CDR3 having an amino acid sequence of a VL CDR1, a VL CDR2, and a VL CDR3, respectively, of a VL having an amino acid sequence of SEQ ID NO:1358. In one embodiment, the first binding domain that binds TRGV9 comprises: a VH comprising a VH CDR1, a VH CDR2, and a VH CDR3 having an amino acid sequence of a VH CDR1, a VH CDR2, and a VH CDR3, respectively, of a VH having an amino acid sequence of SEQ ID NO:1391. In one embodiment, the first binding domain that binds TRGV9 comprises: a VL comprising a VL CDR1, a VL CDR2, and a VL CDR3 having an amino acid sequence of a VL CDR1, a VL CDR2, and a VL CDR3, respectively, of a VL having an amino acid sequence of SEQ ID NO:1392. In one embodiment, the first binding domain that binds TRGV9 comprises: a VH comprising a VH CDR1, a VH CDR2, and a VH CDR3 having an amino acid sequence of a VH CDR1, a VH CDR2, and a VH CDR3, respectively, of a VH having an amino acid sequence of SEQ ID NO:1391; and a VL comprising a VL CDR1, a VL CDR2, and a VL CDR3 having an amino acid sequence of a VL CDR1, a VL CDR2, and a VL CDR3, respectively, of a VL having an amino acid sequence of SEQ ID NO:1392. In one embodiment, the first binding domain that binds TRGV9 comprises: a VH comprising a VH CDR1, a VH CDR2, and a VH CDR3 having an amino acid sequence of a VH CDR1, a VH CDR2, and a VH CDR3, respectively, of a VH having an amino acid sequence of SEQ ID NO:1425. In one embodiment, the first binding domain that binds TRGV9 comprises: a VL comprising a VL CDR1, a VL CDR2, and a VL CDR3 having an amino acid sequence of a VL CDR1, a VL CDR2, and a VL CDR3, respectively, of a VL having an amino acid sequence of SEQ ID NO:1426. In one embodiment, the first binding domain that binds TRGV9 comprises: a VH comprising a VH CDR1, a VH CDR2, and a VH CDR3 having an amino acid sequence of a VH CDR1, a VH CDR2, and a VH CDR3, respectively, of a VH having an amino acid sequence of SEQ ID NO:1425; and a VL comprising a VL CDR1, a VL CDR2, and a VL CDR3 having an amino acid sequence of a VL CDR1, a VL CDR2, and a VL CDR3, respectively, of a VL having an amino acid sequence of SEQ ID NO:1426. In one embodiment, the first binding domain that binds TRGV9 comprises: a VH comprising a VH CDR1, a VH CDR2, and a VH CDR3 having an amino acid sequence of a VH CDR1, a VH CDR2, and a VH CDR3, respectively, of a VH having an amino acid sequence of SEQ ID NO:1459. In one embodiment, the first binding domain that binds TRGV9 comprises: a VL comprising a VL CDR1, a VL CDR2, and a VL CDR3 having an amino acid sequence of a VL CDR1, a VL CDR2, and a VL CDR3, respectively, of a VL having an amino acid sequence of SEQ ID NO:1460. In one embodiment, the first binding domain that binds TRGV9 comprises: a VH comprising a VH CDR1, a VH CDR2, and a VH CDR3 having an amino acid sequence of a VH CDR1, a VH CDR2, and a VH CDR3, respectively, of a VH having an amino acid sequence of SEQ ID NO:1459; and a VL comprising a VL CDR1, a VL CDR2, and a VL CDR3 having an amino acid sequence of a VL CDR1, a VL CDR2, and a VL CDR3, respectively, of a VL having an amino acid sequence of SEQ ID NO:1460. In one embodiment, the first binding domain that binds TRGV9 comprises: a VH comprising a VH CDR1, a VH CDR2, and a VH CDR3 having an amino acid sequence of a VH CDR1, a VH CDR2, and a VH CDR3, respectively, of a VH having an amino acid sequence of SEQ ID NO:1493. In one embodiment, the first binding domain that binds TRGV9 comprises: a VL comprising a VL CDR1, a VL CDR2, and a VL CDR3 having an amino acid sequence of a VL CDR1, a VL CDR2, and a VL CDR3, respectively, of a VL having an amino acid sequence of SEQ ID NO:1494. In one embodiment, the first binding domain that binds TRGV9 comprises: a VH comprising a VH CDR1, a VH CDR2, and a VH CDR3 having an amino acid sequence of a VH CDR1, a VH CDR2, and a VH CDR3, respectively, of a VH having an amino acid sequence of SEQ ID NO:1493; and a VL comprising a VL CDR1, a VL CDR2, and a VL CDR3 having an amino acid sequence of a VL CDR1, a VL CDR2, and a VL CDR3, respectively, of a VL having an amino acid sequence of SEQ ID NO:1494. In one embodiment, the first binding domain that binds TRGV9 comprises: a VH comprising a VH CDR1, a VH CDR2, and a VH CDR3 having an amino acid sequence of a VH CDR1, a VH CDR2, and a VH CDR3, respectively, of a VH having an amino acid sequence of SEQ ID NO:1527. In one embodiment, the first binding domain that binds TRGV9 comprises: a VL comprising a VL CDR1, a VL CDR2, and a VL CDR3 having an amino acid sequence of a VL CDR1, a VL CDR2, and a VL CDR3, respectively, of a VL having an amino acid sequence of SEQ ID NO:1528. In one embodiment, the first binding domain that binds TRGV9 comprises: a VH comprising a VH CDR1, a VH CDR2, and a VH CDR3 having an amino acid sequence of a VH CDR1, a VH CDR2, and a VH CDR3, respectively, of a VH having an amino acid sequence of SEQ ID NO:1527; and a VL comprising a VL CDR1, a VL CDR2, and a VL CDR3 having an amino acid sequence of a VL CDR1, a VL CDR2, and a VL CDR3, respectively, of a VL having an amino acid sequence of SEQ ID NO:1528. In one embodiment, the first binding domain that binds TRGV9 comprises: a VH comprising a VH CDR1, a VH CDR2, and a VH CDR3 having an amino acid sequence of a VH CDR1, a VH CDR2, and a VH CDR3, respectively, of a VH having an amino acid sequence of SEQ ID NO:1561. In one embodiment, the first binding domain that binds TRGV9 comprises: a VL comprising a VL CDR1, a VL CDR2, and a VL CDR3 having an amino acid sequence of a VL CDR1, a VL CDR2, and a VL CDR3, respectively, of a VL having an amino acid sequence of SEQ ID NO:1562. In one embodiment, the first binding domain that binds TRGV9 comprises: a VH comprising a VH CDR1, a VH CDR2, and a VH CDR3 having an amino acid sequence of a VH CDR1, a VH CDR2, and a VH CDR3, respectively, of a VH having an amino acid sequence of SEQ ID NO:1561; and a VL comprising a VL CDR1, a VL CDR2, and a VL CDR3 having an amino acid sequence of a VL CDR1, a VL CDR2, and a VL CDR3, respectively, of a VL having an amino acid sequence of SEQ ID NO:1562. In one embodiment, the first binding domain that binds TRGV9 comprises: a VH comprising a VH CDR1, a VH CDR2, and a VH CDR3 having an amino acid sequence of a VH CDR1, a VH CDR2, and a VH CDR3, respectively, of a VH having an amino acid sequence of SEQ ID NO:1595. In one embodiment, the first binding domain that binds TRGV9 comprises: a VL comprising a VL CDR1, a VL CDR2, and a VL CDR3 having an amino acid sequence of a VL CDR1, a VL CDR2, and a VL CDR3, respectively, of a VL having an amino acid sequence of SEQ ID NO:1596. In one embodiment, the first binding domain that binds TRGV9 comprises: a VH comprising a VH CDR1, a VH CDR2, and a VH CDR3 having an amino acid sequence of a VH CDR1, a VH CDR2, and a VH CDR3, respectively, of a VH having an amino acid sequence of SEQ ID NO:1595; and a VL comprising a VL CDR1, a VL CDR2, and a VL CDR3 having an amino acid sequence of a VL CDR1, a VL CDR2, and a VL CDR3, respectively, of a VL having an amino acid sequence of SEQ ID NO:1596. In one embodiment, the first binding domain that binds TRGV9 comprises: a VH comprising a VH CDR1, a VH CDR2, and a VH CDR3 having an amino acid sequence of a VH CDR1, a VH CDR2, and a VH CDR3, respectively, of a VH having an amino acid sequence of SEQ ID NO:1629. In one embodiment, the first binding domain that binds TRGV9 comprises: a VL comprising a VL CDR1, a VL CDR2, and a VL CDR3 having an amino acid sequence of a VL CDR1, a VL CDR2, and a VL CDR3, respectively, of a VL having an amino acid sequence of SEQ ID NO:1630. In one embodiment, the first binding domain that binds TRGV9 comprises: a VH comprising a VH CDR1, a VH CDR2, and a VH CDR3 having an amino acid sequence of a VH CDR1, a VH CDR2, and a VH CDR3, respectively, of a VH having an amino acid sequence of SEQ ID NO:1629; and a VL comprising a VL CDR1, a VL CDR2, and a VL CDR3 having an amino acid sequence of a VL CDR1, a VL CDR2, and a VL CDR3, respectively, of a VL having an amino acid sequence of SEQ ID NO:1630. In one embodiment, the first binding domain that binds TRGV9 comprises: a VH comprising a VH CDR1, a VH CDR2, and a VH CDR3 having an amino acid sequence of a VH CDR1, a VH CDR2, and a VH CDR3, respectively, of a VH having an amino acid sequence of SEQ ID NO:1663. In one embodiment, the first binding domain that binds TRGV9 comprises: a VL comprising a VL CDR1, a VL CDR2, and a VL CDR3 having an amino acid sequence of a VL CDR1, a VL CDR2, and a VL CDR3, respectively, of a VL having an amino acid sequence of SEQ ID NO:1664. In one embodiment, the first binding domain that binds TRGV9 comprises: a VH comprising a VH CDR1, a VH CDR2, and a VH CDR3 having an amino acid sequence of a VH CDR1, a VH CDR2, and a VH CDR3, respectively, of a VH having an amino acid sequence of SEQ ID NO:1663; and a VL comprising a VL CDR1, a VL CDR2, and a VL CDR3 having an amino acid sequence of a VL CDR1, a VL CDR2, and a VL CDR3, respectively, of a VL having an amino acid sequence of SEQ ID NO:1664. In one embodiment, the first binding domain that binds TRGV9 comprises: a VH comprising a VH CDR1, a VH CDR2, and a VH CDR3 having an amino acid sequence of a VH CDR1, a VH CDR2, and a VH CDR3, respectively, of a VH having an amino acid sequence of SEQ ID NO:1697. In one embodiment, the first binding domain that binds TRGV9 comprises: a VL comprising a VL CDR1, a VL CDR2, and a VL CDR3 having an amino acid sequence of a VL CDR1, a VL CDR2, and a VL CDR3, respectively, of a VL having an amino acid sequence of SEQ ID NO:1698. In one embodiment, the first binding domain that binds TRGV9 comprises: a VH comprising a VH CDR1, a VH CDR2, and a VH CDR3 having an amino acid sequence of a VH CDR1, a VH CDR2, and a VH CDR3, respectively, of a VH having an amino acid sequence of SEQ ID NO:1697; and a VL comprising a VL CDR1, a VL CDR2, and a VL CDR3 having an amino acid sequence of a VL CDR1, a VL CDR2, and a VL CDR3, respectively, of a VL having an amino acid sequence of SEQ ID NO:1698. In one embodiment, the first binding domain that binds TRGV9 comprises: a VH comprising a VH CDR1, a VH CDR2, and a VH CDR3 having an amino acid sequence of a VH CDR1, a VH CDR2, and a VH CDR3, respectively, of a VH having an amino acid sequence of SEQ ID NO:1731. In one embodiment, the first binding domain that binds TRGV9 comprises: a VL comprising a VL CDR1, a VL CDR2, and a VL CDR3 having an amino acid sequence of a VL CDR1, a VL CDR2, and a VL CDR3, respectively, of a VL having an amino acid sequence of SEQ ID NO:1732. In one embodiment, the first binding domain that binds TRGV9 comprises: a VH comprising a VH CDR1, a VH CDR2, and a VH CDR3 having an amino acid sequence of a VH CDR1, a VH CDR2, and a VH CDR3, respectively, of a VH having an amino acid sequence of SEQ ID NO:1731; and a VL comprising a VL CDR1, a VL CDR2, and a VL CDR3 having an amino acid sequence of a VL CDR1, a VL CDR2, and a VL CDR3, respectively, of a VL having an amino acid sequence of SEQ ID NO:1732. In one embodiment, the first binding domain that binds TRGV9 comprises: a VH comprising a VH CDR1, a VH CDR2, and a VH CDR3 having an amino acid sequence of a VH CDR1, a VH CDR2, and a VH CDR3, respectively, of a VH having an amino acid sequence of SEQ ID NO:1765. In one embodiment, the first binding domain that binds TRGV9 comprises: a VL comprising a VL CDR1, a VL CDR2, and a VL CDR3 having an amino acid sequence of a VL CDR1, a VL CDR2, and a VL CDR3, respectively, of a VL having an amino acid sequence of SEQ ID NO:1766. In one embodiment, the first binding domain that binds TRGV9 comprises: a VH comprising a VH CDR1, a VH CDR2, and a VH CDR3 having an amino acid sequence of a VH CDR1, a VH CDR2, and a VH CDR3, respectively, of a VH having an amino acid sequence of SEQ ID NO:1765; and a VL comprising a VL CDR1, a VL CDR2, and a VL CDR3 having an amino acid sequence of a VL CDR1, a VL CDR2, and a VL CDR3, respectively, of a VL having an amino acid sequence of SEQ ID NO:1766. In one embodiment, the first binding domain that binds TRGV9 comprises: a VH comprising a VH CDR1, a VH CDR2, and a VH CDR3 having an amino acid sequence of a VH CDR1, a VH CDR2, and a VH CDR3, respectively, of a VH having an amino acid sequence of SEQ ID NO:1799. In one embodiment, the first binding domain that binds TRGV9 comprises: a VL comprising a VL CDR1, a VL CDR2, and a VL CDR3 having an amino acid sequence of a VL CDR1, a VL CDR2, and a VL CDR3, respectively, of a VL having an amino acid sequence of SEQ ID NO:1800. In one embodiment, the first binding domain that binds TRGV9 comprises: a VH comprising a VH CDR1, a VH CDR2, and a VH CDR3 having an amino acid sequence of a VH CDR1, a VH CDR2, and a VH CDR3, respectively, of a VH having an amino acid sequence of SEQ ID NO:1799; and a VL comprising a VL CDR1, a VL CDR2, and a VL CDR3 having an amino acid sequence of a VL CDR1, a VL CDR2, and a VL CDR3, respectively, of a VL having an amino acid sequence of SEQ ID NO:1800. In one embodiment, the first binding domain that binds TRGV9 comprises: a VH comprising a VH CDR1, a VH CDR2, and a VH CDR3 having an amino acid sequence of a VH CDR1, a VH CDR2, and a VH CDR3, respectively, of a VH having an amino acid sequence of SEQ ID NO:1833. In one embodiment, the first binding domain that binds TRGV9 comprises: a VL comprising a VL CDR1, a VL CDR2, and a VL CDR3 having an amino acid sequence of a VL CDR1, a VL CDR2, and a VL CDR3, respectively, of a VL having an amino acid sequence of SEQ ID NO:1834. In one embodiment, the first binding domain that binds TRGV9 comprises: a VH comprising a VH CDR1, a VH CDR2, and a VH CDR3 having an amino acid sequence of a VH CDR1, a VH CDR2, and a VH CDR3, respectively, of a VH having an amino acid sequence of SEQ ID NO:1833; and a VL comprising a VL CDR1, a VL CDR2, and a VL CDR3 having an amino acid sequence of a VL CDR1, a VL CDR2, and a VL CDR3, respectively, of a VL having an amino acid sequence of SEQ ID NO:1834. In one embodiment, the first binding domain that binds TRGV9 comprises: a VH comprising a VH CDR1, a VH CDR2, and a VH CDR3 having an amino acid sequence of a VH CDR1, a VH CDR2, and a VH CDR3, respectively, of a VH having an amino acid sequence of SEQ ID NO:1867. In one embodiment, the first binding domain that binds TRGV9 comprises: a VL comprising a VL CDR1, a VL CDR2, and a VL CDR3 having an amino acid sequence of a VL CDR1, a VL CDR2, and a VL CDR3, respectively, of a VL having an amino acid sequence of SEQ ID NO:1868. In one embodiment, the first binding domain that binds TRGV9 comprises: a VH comprising a VH CDR1, a VH CDR2, and a VH CDR3 having an amino acid sequence of a VH CDR1, a VH CDR2, and a VH CDR3, respectively, of a VH having an amino acid sequence of SEQ ID NO:1867; and a VL comprising a VL CDR1, a VL CDR2, and a VL CDR3 having an amino acid sequence of a VL CDR1, a VL CDR2, and a VL CDR3, respectively, of a VL having an amino acid sequence of SEQ ID NO:1868. In one embodiment, the first binding domain that binds TRGV9 comprises: a VH comprising a VH CDR1, a VH CDR2, and a VH CDR3 having an amino acid sequence of a VH CDR1, a VH CDR2, and a VH CDR3, respectively, of a VH having an amino acid sequence of SEQ ID NO:1901. In one embodiment, the first binding domain that binds TRGV9 comprises: a VL comprising a VL CDR1, a VL CDR2, and a VL CDR3 having an amino acid sequence of a VL CDR1, a VL CDR2, and a VL CDR3, respectively, of a VL having an amino acid sequence of SEQ ID NO:1902. In one embodiment, the first binding domain that binds TRGV9 comprises: a VH comprising a VH CDR1, a VH CDR2, and a VH CDR3 having an amino acid sequence of a VH CDR1, a VH CDR2, and a VH CDR3, respectively, of a VH having an amino acid sequence of SEQ ID NO:1901; and a VL comprising a VL CDR1, a VL CDR2, and a VL CDR3 having an amino acid sequence of a VL CDR1, a VL CDR2, and a VL CDR3, respectively, of a VL having an amino acid sequence of SEQ ID NO:1902. In one embodiment, the first binding domain that binds TRGV9 comprises: a VH comprising a VH CDR1, a VH CDR2, and a VH CDR3 having an amino acid sequence of a VH CDR1, a VH CDR2, and a VH CDR3, respectively, of a VH having an amino acid sequence of SEQ ID NO:1935. In one embodiment, the first binding domain that binds TRGV9 comprises: a VL comprising a VL CDR1, a VL CDR2, and a VL CDR3 having an amino acid sequence of a VL CDR1, a VL CDR2, and a VL CDR3, respectively, of a VL having an amino acid sequence of SEQ ID NO:1936. In one embodiment, the first binding domain that binds TRGV9 comprises: a VH comprising a VH CDR1, a VH CDR2, and a VH CDR3 having an amino acid sequence of a VH CDR1, a VH CDR2, and a VH CDR3, respectively, of a VH having an amino acid sequence of SEQ ID NO:1935; and a VL comprising a VL CDR1, a VL CDR2, and a VL CDR3 having an amino acid sequence of a VL CDR1, a VL CDR2, and a VL CDR3, respectively, of a VL having an amino acid sequence of SEQ ID NO:1936. In one embodiment, the first binding domain that binds TRGV9 comprises: a VH comprising a VH CDR1, a VH CDR2, and a VH CDR3 having an amino acid sequence of a VH CDR1, a VH CDR2, and a VH CDR3, respectively, of a VH having an amino acid sequence of SEQ ID NO:1969. In one embodiment, the first binding domain that binds TRGV9 comprises: a VL comprising a VL CDR1, a VL CDR2, and a VL CDR3 having an amino acid sequence of a VL CDR1, a VL CDR2, and a VL CDR3, respectively, of a VL having an amino acid sequence of SEQ ID NO:1970. In one embodiment, the first binding domain that binds TRGV9 comprises: a VH comprising a VH CDR1, a VH CDR2, and a VH CDR3 having an amino acid sequence of a VH CDR1, a VH CDR2, and a VH CDR3, respectively, of a VH having an amino acid sequence of SEQ ID NO:1969; and a VL comprising a VL CDR1, a VL CDR2, and a VL CDR3 having an amino acid sequence of a VL CDR1, a VL CDR2, and a VL CDR3, respectively, of a VL having an amino acid sequence of SEQ ID NO:1970. In one embodiment, the first binding domain that binds TRGV9 comprises: a VH comprising a VH CDR1, a VH CDR2, and a VH CDR3 having an amino acid sequence of a VH CDR1, a VH CDR2, and a VH CDR3, respectively, of a VH having an amino acid sequence of SEQ ID NO:2003. In one embodiment, the first binding domain that binds TRGV9 comprises: a VL comprising a VL CDR1, a VL CDR2, and a VL CDR3 having an amino acid sequence of a VL CDR1, a VL CDR2, and a VL CDR3, respectively, of a VL having an amino acid sequence of SEQ ID NO:2004. In one embodiment, the first binding domain that binds TRGV9 comprises: a VH comprising a VH CDR1, a VH CDR2, and a VH CDR3 having an amino acid sequence of a VH CDR1, a VH CDR2, and a VH CDR3, respectively, of a VH having an amino acid sequence of SEQ ID NO:2003; and a VL comprising a VL CDR1, a VL CDR2, and a VL CDR3 having an amino acid sequence of a VL CDR1, a VL CDR2, and a VL CDR3, respectively, of a VL having an amino acid sequence of SEQ ID NO:2004.

[0261] In another aspect, provided herein is a multispecific antibody that binds TRDV2. In some embodiments, the multispecific antibody is a bispecific antibody. In some embodiments, the multispecific antibody is a trispecific antibody. In some embodiments, the multispecific antibody is a quadraspecific antibody. In one embodiment, the multispecific TRDV2 antibody comprises: (a) a first binding domain that binds TRDV2, and (b) a second binding domain that binds to a second target. In one embodiment, the multispecific TRDV2 antibody comprises: (a) a first binding domain that binds TRDV2, and (b) a second binding domain that binds to a second target, and (c) a third binding domain that binds to a third target. In one embodiment, the multispecific TRDV2 antibody comprises: (a) a first binding domain that binds TRDV2, and (b) a second binding domain that binds to a second target, (c) a third binding domain that binds to a third target, and (d) a fourth binding domain that binds to a fourth target.

[0262] In one embodiment, the first binding domain that binds TRDV2 comprises: a VH comprising a VH CDR1, a VH CDR2, and a VH CDR3 having an amino acid sequence of a VH CDR1, a VH CDR2, and a VH CDR3, respectively, of a VH having an amino acid sequence of SEQ ID NO:2037. In one embodiment, the first binding domain that binds TRDV2 comprises: a VL comprising a VL CDR1, a VL CDR2, and a VL CDR3 having an amino acid sequence of a VL CDR1, a VL CDR2, and a VL CDR3, respectively, of a VL having an amino acid sequence of SEQ ID NO:2038. In one embodiment, the first binding domain that binds TRDV2 comprises: a VH comprising a VH CDR1, a VH CDR2, and a VH CDR3 having an amino acid sequence of a VH CDR1, a VH CDR2, and a VH CDR3, respectively, of a VH having an amino acid sequence of SEQ ID NO:2037; and a VL comprising a VL CDR1, a VL CDR2, and a VL CDR3 having an amino acid sequence of a VL CDR1, a VL CDR2, and a VL CDR3, respectively, of a VL having an amino acid sequence of SEQ ID NO:2038. In one embodiment, the first binding domain that binds TRDV2 comprises: a VH comprising a VH CDR1, a VH CDR2, and a VH CDR3 having an amino acid sequence of a VH CDR1, a VH CDR2, and a VH CDR3, respectively, of a VH having an amino acid sequence of SEQ ID NO:2071. In one embodiment, the first binding domain that binds TRDV2 comprises: a VL comprising a VL CDR1, a VL CDR2, and a VL CDR3 having an amino acid sequence of a VL CDR1, a VL CDR2, and a VL CDR3, respectively, of a VL having an amino acid sequence of SEQ ID NO:2072. In one embodiment, the first binding domain that binds TRDV2 comprises: a VH comprising a VH CDR1, a VH CDR2, and a VH CDR3 having an amino acid sequence of a VH CDR1, a VH CDR2, and a VH CDR3, respectively, of a VH having an amino acid sequence of SEQ ID NO:2071; and a VL comprising a VL CDR1, a VL CDR2, and a VL CDR3 having an amino acid sequence of a VL CDR1, a VL CDR2, and a VL CDR3, respectively, of a VL having an amino acid sequence of SEQ ID NO:2072. In one embodiment, the first binding domain that binds TRDV2 comprises: a VH comprising a VH CDR1, a VH CDR2, and a VH CDR3 having an amino acid sequence of a VH CDR1, a VH CDR2, and a VH CDR3, respectively, of a VH having an amino acid sequence of SEQ ID NO:2105. In one embodiment, the first binding domain that binds TRDV2 comprises: a VL comprising a VL CDR1, a VL CDR2, and a VL CDR3 having an amino acid sequence of a VL CDR1, a VL CDR2, and a VL CDR3, respectively, of a VL having an amino acid sequence of SEQ ID NO:2106. In one embodiment, the first binding domain that binds TRDV2 comprises: a VH comprising a VH CDR1, a VH CDR2, and a VH CDR3 having an amino acid sequence of a VH CDR1, a VH CDR2, and a VH CDR3, respectively, of a VH having an amino acid sequence of SEQ ID NO:2105; and a VL comprising a VL CDR1, a VL CDR2, and a VL CDR3 having an amino acid sequence of a VL CDR1, a VL CDR2, and a VL CDR3, respectively, of a VL having an amino acid sequence of SEQ ID NO:2106. In one embodiment, the first binding domain that binds TRDV2 comprises: a VH comprising a VH CDR1, a VH CDR2, and a VH CDR3 having an amino acid sequence of a VH CDR1, a VH CDR2, and a VH CDR3, respectively, of a VH having an amino acid sequence of SEQ ID NO:2139. In one embodiment, the first binding domain that binds TRDV2 comprises: a VL comprising a VL CDR1, a VL CDR2, and a VL CDR3 having an amino acid sequence of a VL CDR1, a VL CDR2, and a VL CDR3, respectively, of a VL having an amino acid sequence of SEQ ID NO:2140. In one embodiment, the first binding domain that binds TRDV2 comprises: a VH comprising a VH CDR1, a VH CDR2, and a VH CDR3 having an amino acid sequence of a VH CDR1, a VH CDR2, and a VH CDR3, respectively, of a VH having an amino acid sequence of SEQ ID NO:2139; and a VL comprising a VL CDR1, a VL CDR2, and a VL CDR3 having an amino acid sequence of a VL CDR1, a VL CDR2, and a VL CDR3, respectively, of a VL having an amino acid sequence of SEQ ID NO:2140. In one embodiment, the first binding domain that binds TRDV2 comprises: a VH comprising a VH CDR1, a VH CDR2, and a VH CDR3 having an amino acid sequence of a VH CDR1, a VH CDR2, and a VH CDR3, respectively, of a VH having an amino acid sequence of SEQ ID NO:2173. In one embodiment, the first binding domain that binds TRDV2 comprises: a VL comprising a VL CDR1, a VL CDR2, and a VL CDR3 having an amino acid sequence of a VL CDR1, a VL CDR2, and a VL CDR3, respectively, of a VL having an amino acid sequence of SEQ ID NO:2174. In one embodiment, the first binding domain that binds TRDV2 comprises: a VH comprising a VH CDR1, a VH CDR2, and a VH CDR3 having an amino acid sequence of a VH CDR1, a VH CDR2, and a VH CDR3, respectively, of a VH having an amino acid sequence of SEQ ID NO:2173; and a VL comprising a VL CDR1, a VL CDR2, and a VL CDR3 having an amino acid sequence of a VL CDR1, a VL CDR2, and a VL CDR3, respectively, of a VL having an amino acid sequence of SEQ ID NO:2174. In one embodiment, the first binding domain that binds TRDV2 comprises: a VH comprising a VH CDR1, a VH CDR2, and a VH CDR3 having an amino acid sequence of a VH CDR1, a VH CDR2, and a VH CDR3, respectively, of a VH having an amino acid sequence of SEQ ID NO:2207. In one embodiment, the first binding domain that binds TRDV2 comprises: a VL comprising a VL CDR1, a VL CDR2, and a VL CDR3 having an amino acid sequence of a VL CDR1, a VL CDR2, and a VL CDR3, respectively, of a VL having an amino acid sequence of SEQ ID NO:2208. In one embodiment, the first binding domain that binds TRDV2 comprises: a VH comprising a VH CDR1, a VH CDR2, and a VH CDR3 having an amino acid sequence of a VH CDR1, a VH CDR2, and a VH CDR3, respectively, of a VH having an amino acid sequence of SEQ ID NO:2207; and a VL comprising a VL CDR1, a VL CDR2, and a VL CDR3 having an amino acid sequence of a VL CDR1, a VL CDR2, and a VL CDR3, respectively, of a VL having an amino acid sequence of SEQ ID NO:2208. In one embodiment, the first binding domain that binds TRDV2 comprises: a VH comprising a VH CDR1, a VH CDR2, and a VH CDR3 having an amino acid sequence of a VH CDR1, a VH CDR2, and a VH CDR3, respectively, of a VH having an amino acid sequence of SEQ ID NO:2241. In one embodiment, the first binding domain that binds TRDV2 comprises: a VL comprising a VL CDR1, a VL CDR2, and a VL CDR3 having an amino acid sequence of a VL CDR1, a VL CDR2, and a VL CDR3, respectively, of a VL having an amino acid sequence of SEQ ID NO:2242. In one embodiment, the first binding domain that binds TRDV2 comprises: a VH comprising a VH CDR1, a VH CDR2, and a VH CDR3 having an amino acid sequence of a VH CDR1, a VH CDR2, and a VH CDR3, respectively, of a VH having an amino acid sequence of SEQ ID NO:2241; and a VL comprising a VL CDR1, a VL CDR2, and a VL CDR3 having an amino acid sequence of a VL CDR1, a VL CDR2, and a VL CDR3, respectively, of a VL having an amino acid sequence of SEQ ID NO:2242. In one embodiment, the first binding domain that binds TRDV2 comprises: a VH comprising a VH CDR1, a VH CDR2, and a VH CDR3 having an amino acid sequence of a VH CDR1, a VH CDR2, and a VH CDR3, respectively, of a VH having an amino acid sequence of SEQ ID NO:2275. In one embodiment, the first binding domain that binds TRDV2 comprises: a VL comprising a VL CDR1, a VL CDR2, and a VL CDR3 having an amino acid sequence of a VL CDR1, a VL CDR2, and a VL CDR3, respectively, of a VL having an amino acid sequence of SEQ ID NO:2276. In one embodiment, the first binding domain that binds TRDV2 comprises: a VH comprising a VH CDR1, a VH CDR2, and a VH CDR3 having an amino acid sequence of a VH CDR1, a VH CDR2, and a VH CDR3, respectively, of a VH having an amino acid sequence of SEQ ID NO:2275; and a VL comprising a VL CDR1, a VL CDR2, and a VL CDR3 having an amino acid sequence of a VL CDR1, a VL CDR2, and a VL CDR3, respectively, of a VL having an amino acid sequence of SEQ ID NO:2276. In one embodiment, the first binding domain that binds TRDV2 comprises: a VH comprising a VH CDR1, a VH CDR2, and a VH CDR3 having an amino acid sequence of a VH CDR1, a VH CDR2, and a VH CDR3, respectively, of a VH having an amino acid sequence of SEQ ID NO:2309. In one embodiment, the first binding domain that binds TRDV2 comprises: a VL comprising a VL CDR1, a VL CDR2, and a VL CDR3 having an amino acid sequence of a VL CDR1, a VL CDR2, and a VL CDR3, respectively, of a VL having an amino acid sequence of SEQ ID NO:2310. In one embodiment, the first binding domain that binds TRDV2 comprises: a VH comprising a VH CDR1, a VH CDR2, and a VH CDR3 having an amino acid sequence of a VH CDR1, a VH CDR2, and a VH CDR3, respectively, of a VH having an amino acid sequence of SEQ ID NO:2309; and a VL comprising a VL CDR1, a VL CDR2, and a VL CDR3 having an amino acid sequence of a VL CDR1, a VL CDR2, and a VL CDR3, respectively, of a VL having an amino acid sequence of SEQ ID NO:2310. In one embodiment, the first binding domain that binds TRDV2 comprises: a VH comprising a VH CDR1, a VH CDR2, and a VH CDR3 having an amino acid sequence of a VH CDR1, a VH CDR2, and a VH CDR3, respectively, of a VH having an amino acid sequence of SEQ ID NO:2343. In one embodiment, the first binding domain that binds TRDV2 comprises: a VL comprising a VL CDR1, a VL CDR2, and a VL CDR3 having an amino acid sequence of a VL CDR1, a VL CDR2, and a VL CDR3, respectively, of a VL having an amino acid sequence of SEQ ID NO:2344. In one embodiment, the first binding domain that binds TRDV2 comprises: a VH comprising a VH CDR1, a VH CDR2, and a VH CDR3 having an amino acid sequence of a VH CDR1, a VH CDR2, and a VH CDR3, respectively, of a VH having an amino acid sequence of SEQ ID NO:2343; and a VL comprising a VL CDR1, a VL CDR2, and a VL CDR3 having an amino acid sequence of a VL CDR1, a VL CDR2, and a VL CDR3, respectively, of a VL having an amino acid sequence of SEQ ID NO:2344. In one embodiment, the first binding domain that binds TRDV2 comprises: a VH comprising a VH CDR1, a VH CDR2, and a VH CDR3 having an amino acid sequence of a VH CDR1, a VH CDR2, and a VH CDR3, respectively, of a VH having an amino acid sequence of SEQ ID NO:2377. In one embodiment, the first binding domain that binds TRDV2 comprises: a VL comprising a VL CDR1, a VL CDR2, and a VL CDR3 having an amino acid sequence of a VL CDR1, a VL CDR2, and a VL CDR3, respectively, of a VL having an amino acid sequence of SEQ ID NO:2378. In one embodiment, the first binding domain that binds TRDV2 comprises: a VH comprising a VH CDR1, a VH CDR2, and a VH CDR3 having an amino acid sequence of a VH CDR1, a VH CDR2, and a VH CDR3, respectively, of a VH having an amino acid sequence of SEQ ID NO:2377; and a VL comprising a VL CDR1, a VL CDR2, and a VL CDR3 having an amino acid sequence of a VL CDR1, a VL CDR2, and a VL CDR3, respectively, of a VL having an amino acid sequence of SEQ ID NO:2378. In one embodiment, the first binding domain that binds TRDV2 comprises: a VH comprising a VH CDR1, a VH CDR2, and a VH CDR3 having an amino acid sequence of a VH CDR1, a VH CDR2, and a VH CDR3, respectively, of a VH having an amino acid sequence of SEQ ID NO:2411. In one embodiment, the first binding domain that binds TRDV2 comprises: a VL comprising a VL CDR1, a VL CDR2, and a VL CDR3 having an amino acid sequence of a VL CDR1, a VL CDR2, and a VL CDR3, respectively, of a VL having an amino acid sequence of SEQ ID NO:2412. In one embodiment, the first binding domain that binds TRDV2 comprises: a VH comprising a VH CDR1, a VH CDR2, and a VH CDR3 having an amino acid sequence of a VH CDR1, a VH CDR2, and a VH CDR3, respectively, of a VH having an amino acid sequence of SEQ ID NO:2411; and a VL comprising a VL CDR1, a VL CDR2, and a VL CDR3 having an amino acid sequence of a VL CDR1, a VL CDR2, and a VL CDR3, respectively, of a VL having an amino acid sequence of SEQ ID NO:2412. In one embodiment, the first binding domain that binds TRDV2 comprises: a VH comprising a VH CDR1, a VH CDR2, and a VH CDR3 having an amino acid sequence of a VH CDR1, a VH CDR2, and a VH CDR3, respectively, of a VH having an amino acid sequence of SEQ ID NO:2445. In one embodiment, the first binding domain that binds TRDV2 comprises: a VL comprising a VL CDR1, a VL CDR2, and a VL CDR3 having an amino acid sequence of a VL CDR1, a VL CDR2, and a VL CDR3, respectively, of a VL having an amino acid sequence of SEQ ID NO:2446. In one embodiment, the first binding domain that binds TRDV2 comprises: a VH comprising a VH CDR1, a VH CDR2, and a VH CDR3 having an amino acid sequence of a VH CDR1, a VH CDR2, and a VH CDR3, respectively, of a VH having an amino acid sequence of SEQ ID NO:2445; and a VL comprising a VL CDR1, a VL CDR2, and a VL CDR3 having an amino acid sequence of a VL CDR1, a VL CDR2, and a VL CDR3, respectively, of a VL having an amino acid sequence of SEQ ID NO:2446. In one embodiment, the first binding domain that binds TRDV2 comprises: a VH comprising a VH CDR1, a VH CDR2, and a VH CDR3 having an amino acid sequence of a VH CDR1, a VH CDR2, and a VH CDR3, respectively, of a VH having an amino acid sequence of SEQ ID NO:2479. In one embodiment, the first binding domain that binds TRDV2 comprises: a VL comprising a VL CDR1, a VL CDR2, and a VL CDR3 having an amino acid sequence of a VL CDR1, a VL CDR2, and a VL CDR3, respectively, of a VL having an amino acid sequence of SEQ ID NO:2480. In one embodiment, the first binding domain that binds TRDV2 comprises: a VH comprising a VH CDR1, a VH CDR2, and a VH CDR3 having an amino acid sequence of a VH CDR1, a VH CDR2, and a VH CDR3, respectively, of a VH having an amino acid sequence of SEQ ID NO:2479; and a VL comprising a VL CDR1, a VL CDR2, and a VL CDR3 having an amino acid sequence of a VL CDR1, a VL CDR2, and a VL CDR3, respectively, of a VL having an amino acid sequence of SEQ ID NO:2480. In one embodiment, the first binding domain that binds TRDV2 comprises: a VH comprising a VH CDR1, a VH CDR2, and a VH CDR3 having an amino acid sequence of a VH CDR1, a VH CDR2, and a VH CDR3, respectively, of a VH having an amino acid sequence of SEQ ID NO:2513. In one embodiment, the first binding domain that binds TRDV2 comprises: a VL comprising a VL CDR1, a VL CDR2, and a VL CDR3 having an amino acid sequence of a VL CDR1, a VL CDR2, and a VL CDR3, respectively, of a VL having an amino acid sequence of SEQ ID NO:2514. In one embodiment, the first binding domain that binds TRDV2 comprises: a VH comprising a VH CDR1, a VH CDR2, and a VH CDR3 having an amino acid sequence of a VH CDR1, a VH CDR2, and a VH CDR3, respectively, of a VH having an amino acid sequence of SEQ ID NO:2513; and a VL comprising a VL CDR1, a VL CDR2, and a VL CDR3 having an amino acid sequence of a VL CDR1, a VL CDR2, and a VL CDR3, respectively, of a VL having an amino acid sequence of SEQ ID NO:2514. In one embodiment, the first binding domain that binds TRDV2 comprises: a VH comprising a VH CDR1, a VH CDR2, and a VH CDR3 having an amino acid sequence of a VH CDR1, a VH CDR2, and a VH CDR3, respectively, of a VH having an amino acid sequence of SEQ ID NO:2547. In one embodiment, the first binding domain that binds TRDV2 comprises: a VL comprising a VL CDR1, a VL CDR2, and a VL CDR3 having an amino acid sequence of a VL CDR1, a VL CDR2, and a VL CDR3, respectively, of a VL having an amino acid sequence of SEQ ID NO:2548. In one embodiment, the first binding domain that binds TRDV2 comprises: a VH comprising a VH CDR1, a VH CDR2, and a VH CDR3 having an amino acid sequence of a VH CDR1, a VH CDR2, and a VH CDR3, respectively, of a VH having an amino acid sequence of SEQ ID NO:2547; and a VL comprising a VL CDR1, a VL CDR2, and a VL CDR3 having an amino acid sequence of a VL CDR1, a VL CDR2, and a VL CDR3, respectively, of a VL having an amino acid sequence of SEQ ID NO:2548. In one embodiment, the first binding domain that binds TRDV2 comprises: a VH comprising a VH CDR1, a VH CDR2, and a VH CDR3 having an amino acid sequence of a VH CDR1, a VH CDR2, and a VH CDR3, respectively, of a VH having an amino acid sequence of SEQ ID NO:2581. In one embodiment, the first binding domain that binds TRDV2 comprises: a VL comprising a VL CDR1, a VL CDR2, and a VL CDR3 having an amino acid sequence of a VL CDR1, a VL CDR2, and a VL CDR3, respectively, of a VL having an amino acid sequence of SEQ ID NO:2582. In one embodiment, the first binding domain that binds TRDV2 comprises: a VH comprising a VH CDR1, a VH CDR2, and a VH CDR3 having an amino acid sequence of a VH CDR1, a VH CDR2, and a VH CDR3, respectively, of a VH having an amino acid sequence of SEQ ID NO:2581; and a VL comprising a VL CDR1, a VL CDR2, and a VL CDR3 having an amino acid sequence of a VL CDR1, a VL CDR2, and a VL CDR3, respectively, of a VL having an amino acid sequence of SEQ ID NO:2582. In one embodiment, the first binding domain that binds TRDV2 comprises: a VH comprising a VH CDR1, a VH CDR2, and a VH CDR3 having an amino acid sequence of a VH CDR1, a VH CDR2, and a VH CDR3, respectively, of a VH having an amino acid sequence of SEQ ID NO:2615. In one embodiment, the first binding domain that binds TRDV2 comprises: a VL comprising a VL CDR1, a VL CDR2, and a VL CDR3 having an amino acid sequence of a VL CDR1, a VL CDR2, and a VL CDR3, respectively, of a VL having an amino acid sequence of SEQ ID NO:2616. In one embodiment, the first binding domain that binds TRDV2 comprises: a VH comprising a VH CDR1, a VH CDR2, and a VH CDR3 having an amino acid sequence of a VH CDR1, a VH CDR2, and a VH CDR3, respectively, of a VH having an amino acid sequence of SEQ ID NO:2615; and a VL comprising a VL CDR1, a VL CDR2, and a VL CDR3 having an amino acid sequence of a VL CDR1, a VL CDR2, and a VL CDR3, respectively, of a VL having an amino acid sequence of SEQ ID NO:2616. In one embodiment, the first binding domain that binds TRDV2 comprises: a VH comprising a VH CDR1, a VH CDR2, and a VH CDR3 having an amino acid sequence of a VH CDR1, a VH CDR2, and a VH CDR3, respectively, of a VH having an amino acid sequence of SEQ ID NO:2649. In one embodiment, the first binding domain that binds TRDV2 comprises: a VL comprising a VL CDR1, a VL CDR2, and a VL CDR3 having an amino acid sequence of a VL CDR1, a VL CDR2, and a VL CDR3, respectively, of a VL having an amino acid sequence of SEQ ID NO:2650. In one embodiment, the first binding domain that binds TRDV2 comprises: a VH comprising a VH CDR1, a VH CDR2, and a VH CDR3 having an amino acid sequence of a VH CDR1, a VH CDR2, and a VH CDR3, respectively, of a VH having an amino acid sequence of SEQ ID NO:2649; and a VL comprising a VL CDR1, a VL CDR2, and a VL CDR3 having an amino acid sequence of a VL CDR1, a VL CDR2, and a VL CDR3, respectively, of a VL having an amino acid sequence of SEQ ID NO:2650. In one embodiment, the first binding domain that binds TRDV2 comprises: a VH comprising a VH CDR1, a VH CDR2, and a VH CDR3 having an amino acid sequence of a VH CDR1, a VH CDR2, and a VH CDR3, respectively, of a VH having an amino acid sequence of SEQ ID NO:2683. In one embodiment, the first binding domain that binds TRDV2 comprises: a VL comprising a VL CDR1, a VL CDR2, and a VL CDR3 having an amino acid sequence of a VL CDR1, a VL CDR2, and a VL CDR3, respectively, of a VL having an amino acid sequence of SEQ ID NO:2684. In one embodiment, the first binding domain that binds TRDV2 comprises: a VH comprising a VH CDR1, a VH CDR2, and a VH CDR3 having an amino acid sequence of a VH CDR1, a VH CDR2, and a VH CDR3, respectively, of a VH having an amino acid sequence of SEQ ID NO:2683; and a VL comprising a VL CDR1, a VL CDR2, and a VL CDR3 having an amino acid sequence of a VL CDR1, a VL CDR2, and a VL CDR3, respectively, of a VL having an amino acid sequence of SEQ ID NO:2684. In one embodiment, the first binding domain that binds TRDV2 comprises: a VH comprising a VH CDR1, a VH CDR2, and a VH CDR3 having an amino acid sequence of a VH CDR1, a VH CDR2, and a VH CDR3, respectively, of a VH having an amino acid sequence of SEQ ID NO:2717. In one embodiment, the first binding domain that binds TRDV2 comprises: a VL comprising a VL CDR1, a VL CDR2, and a VL CDR3 having an amino acid sequence of a VL CDR1, a VL CDR2, and a VL CDR3, respectively, of a VL having an amino acid sequence of SEQ ID NO:2718. In one embodiment, the first binding domain that binds TRDV2 comprises: a VH comprising a VH CDR1, a VH CDR2, and a VH CDR3 having an amino acid sequence of a VH CDR1, a VH CDR2, and a VH CDR3, respectively, of a VH having an amino acid sequence of SEQ ID NO:2717; and a VL comprising a VL CDR1, a VL CDR2, and a VL CDR3 having an amino acid sequence of a VL CDR1, a VL CDR2, and a VL CDR3, respectively, of a VL having an amino acid sequence of SEQ ID NO:2718. In one embodiment, the first binding domain that binds TRDV2 comprises: a VH comprising a VH CDR1, a VH CDR2, and a VH CDR3 having an amino acid sequence of a VH CDR1, a VH CDR2, and a VH CDR3, respectively, of a VH having an amino acid sequence of SEQ ID NO:2751. In one embodiment, the first binding domain that binds TRDV2 comprises: a VL comprising a VL CDR1, a VL CDR2, and a VL CDR3 having an amino acid sequence of a VL CDR1, a VL CDR2, and a VL CDR3, respectively, of a VL having an amino acid sequence of SEQ ID NO:2752. In one embodiment, the first binding domain that binds TRDV2 comprises: a VH comprising a VH CDR1, a VH CDR2, and a VH CDR3 having an amino acid sequence of a VH CDR1, a VH CDR2, and a VH CDR3, respectively, of a VH having an amino acid sequence of SEQ ID NO:2751; and a VL comprising a VL CDR1, a VL CDR2, and a VL CDR3 having an amino acid sequence of a VL CDR1, a VL CDR2, and a VL CDR3, respectively, of a VL having an amino acid sequence of SEQ ID NO:2752. In one embodiment, the first binding domain that binds TRDV2 comprises: a VH comprising a VH CDR1, a VH CDR2, and a VH CDR3 having an amino acid sequence of a VH CDR1, a VH CDR2, and a VH CDR3, respectively, of a VH having an amino acid sequence of SEQ ID NO:2785. In one embodiment, the first binding domain that binds TRDV2 comprises: a VL comprising a VL CDR1, a VL CDR2, and a VL CDR3 having an amino acid sequence of a VL CDR1, a VL CDR2, and a VL CDR3, respectively, of a VL having an amino acid sequence of SEQ ID NO:2786. In one embodiment, the first binding domain that binds TRDV2 comprises: a VH comprising a VH CDR1, a VH CDR2, and a VH CDR3 having an amino acid sequence of a VH CDR1, a VH CDR2, and a VH CDR3, respectively, of a VH having an amino acid sequence of SEQ ID NO:2785; and a VL comprising a VL CDR1, a VL CDR2, and a VL CDR3 having an amino acid sequence of a VL CDR1, a VL CDR2, and a VL CDR3, respectively, of a VL having an amino acid sequence of SEQ ID NO:2786. In one embodiment, the first binding domain that binds TRDV2 comprises: a VH comprising a VH CDR1, a VH CDR2, and a VH CDR3 having an amino acid sequence of a VH CDR1, a VH CDR2, and a VH CDR3, respectively, of a VH having an amino acid sequence of SEQ ID NO:2819. In one embodiment, the first binding domain that binds TRDV2 comprises: a VL comprising a VL CDR1, a VL CDR2, and a VL CDR3 having an amino acid sequence of a VL CDR1, a VL CDR2, and a VL CDR3, respectively, of a VL having an amino acid sequence of SEQ ID NO:2820. In one embodiment, the first binding domain that binds TRDV2 comprises: a VH comprising a VH CDR1, a VH CDR2, and a VH CDR3 having an amino acid sequence of a VH CDR1, a VH CDR2, and a VH CDR3, respectively, of a VH having an amino acid sequence of SEQ ID NO:2819; and a VL comprising a VL CDR1, a VL CDR2, and a VL CDR3 having an amino acid sequence of a VL CDR1, a VL CDR2, and a VL CDR3, respectively, of a VL having an amino acid sequence of SEQ ID NO:2820. In one embodiment, the first binding domain that binds TRDV2 comprises: a VH comprising a VH CDR1, a VH CDR2, and a VH CDR3 having an amino acid sequence of a VH CDR1, a VH CDR2, and a VH CDR3, respectively, of a VH having an amino acid sequence of SEQ ID NO:2853. In one embodiment, the first binding domain that binds TRDV2 comprises: a VL comprising a VL CDR1, a VL CDR2, and a VL CDR3 having an amino acid sequence of a VL CDR1, a VL CDR2, and a VL CDR3, respectively, of a VL having an amino acid sequence of SEQ ID NO:2854. In one embodiment, the first binding domain that binds TRDV2 comprises: a VH comprising a VH CDR1, a VH CDR2, and a VH CDR3 having an amino acid sequence of a VH CDR1, a VH CDR2, and a VH CDR3, respectively, of a VH having an amino acid sequence of SEQ ID NO:2853; and a VL comprising a VL CDR1, a VL CDR2, and a VL CDR3 having an amino acid sequence of a VL CDR1, a VL CDR2, and a VL CDR3, respectively, of a VL having an amino acid sequence of SEQ ID NO:2854. In one embodiment, the first binding domain that binds TRDV2 comprises: a VH comprising a VH CDR1, a VH CDR2, and a VH CDR3 having an amino acid sequence of a VH CDR1, a VH CDR2, and a VH CDR3, respectively, of a VH having an amino acid sequence of SEQ ID NO:2887. In one embodiment, the first binding domain that binds TRDV2 comprises: a VL comprising a VL CDR1, a VL CDR2, and a VL CDR3 having an amino acid sequence of a VL CDR1, a VL CDR2, and a VL CDR3, respectively, of a VL having an amino acid sequence of SEQ ID NO:2888. In one embodiment, the first binding domain that binds TRDV2 comprises: a VH comprising a VH CDR1, a VH CDR2, and a VH CDR3 having an amino acid sequence of a VH CDR1, a VH CDR2, and a VH CDR3, respectively, of a VH having an amino acid sequence of SEQ ID NO:2887; and a VL comprising a VL CDR1, a VL CDR2, and a VL CDR3 having an amino acid sequence of a VL CDR1, a VL CDR2, and a VL CDR3, respectively, of a VL having an amino acid sequence of SEQ ID NO:2888. In one embodiment, the first binding domain that binds TRDV2 comprises: a VH comprising a VH CDR1, a VH CDR2, and a VH CDR3 having an amino acid sequence of a VH CDR1, a VH CDR2, and a VH CDR3, respectively, of a VH having an amino acid sequence of SEQ ID NO:2921. In one embodiment, the first binding domain that binds TRDV2 comprises: a VL comprising a VL CDR1, a VL CDR2, and a VL CDR3 having an amino acid sequence of a VL CDR1, a VL CDR2, and a VL CDR3, respectively, of a VL having an amino acid sequence of SEQ ID NO:2922. In one embodiment, the first binding domain that binds TRDV2 comprises: a VH comprising a VH CDR1, a VH CDR2, and a VH CDR3 having an amino acid sequence of a VH CDR1, a VH CDR2, and a VH CDR3, respectively, of a VH having an amino acid sequence of SEQ ID NO:2921; and a VL comprising a VL CDR1, a VL CDR2, and a VL CDR3 having an amino acid sequence of a VL CDR1, a VL CDR2, and a VL CDR3, respectively, of a VL having an amino acid sequence of SEQ ID NO:2922. In one embodiment, the first binding domain that binds TRDV2 comprises: a VH comprising a VH CDR1, a VH CDR2, and a VH CDR3 having an amino acid sequence of a VH CDR1, a VH CDR2, and a VH CDR3, respectively, of a VH having an amino acid sequence of SEQ ID NO:2955. In one embodiment, the first binding domain that binds TRDV2 comprises: a VL comprising a VL CDR1, a VL CDR2, and a VL CDR3 having an amino acid sequence of a VL CDR1, a VL CDR2, and a VL CDR3, respectively, of a VL having an amino acid sequence of SEQ ID NO:2956. In one embodiment, the first binding domain that binds TRDV2 comprises: a VH comprising a VH CDR1, a VH CDR2, and a VH CDR3 having an amino acid sequence of a VH CDR1, a VH CDR2, and a VH CDR3, respectively, of a VH having an amino acid sequence of SEQ ID NO:2955; and a VL comprising a VL CDR1, a VL CDR2, and a VL CDR3 having an amino acid sequence of a VL CDR1, a VL CDR2, and a VL CDR3, respectively, of a VL having an amino acid sequence of SEQ ID NO:2956. In one embodiment, the first binding domain that binds TRDV2 comprises: a VH comprising a VH CDR1, a VH CDR2, and a VH CDR3 having an amino acid sequence of a VH CDR1, a VH CDR2, and a VH CDR3, respectively, of a VH having an amino acid sequence of SEQ ID NO:2989. In one embodiment, the first binding domain that binds TRDV2 comprises: a VL comprising a VL CDR1, a VL CDR2, and a VL CDR3 having an amino acid sequence of a VL CDR1, a VL CDR2, and a VL CDR3, respectively, of a VL having an amino acid sequence of SEQ ID NO:2990. In one embodiment, the first binding domain that binds TRDV2 comprises: a VH comprising a VH CDR1, a VH CDR2, and a VH CDR3 having an amino acid sequence of a VH CDR1, a VH CDR2, and a VH CDR3, respectively, of a VH having an amino acid sequence of SEQ ID NO:2989; and a VL comprising a VL CDR1, a VL CDR2, and a VL CDR3 having an amino acid sequence of a VL CDR1, a VL CDR2, and a VL CDR3, respectively, of a VL having an amino acid sequence of SEQ ID NO:2990. In one embodiment, the first binding domain that binds TRDV2 comprises: a VH comprising a VH CDR1, a VH CDR2, and a VH CDR3 having an amino acid sequence of a VH CDR1, a VH CDR2, and a VH CDR3, respectively, of a VH having an amino acid sequence of SEQ ID NO:3023. In one embodiment, the first binding domain that binds TRDV2 comprises: a VL comprising a VL CDR1, a VL CDR2, and a VL CDR3 having an amino acid sequence of a VL CDR1, a VL CDR2, and a VL CDR3, respectively, of a VL having an amino acid sequence of SEQ ID NO:3024. In one embodiment, the first binding domain that binds TRDV2 comprises: a VH comprising a VH CDR1, a VH CDR2, and a VH CDR3 having an amino acid sequence of a VH CDR1, a VH CDR2, and a VH CDR3, respectively, of a VH having an amino acid sequence of SEQ ID NO:3023; and a VL comprising a VL CDR1, a VL CDR2, and a VL CDR3 having an amino acid sequence of a VL CDR1, a VL CDR2, and a VL CDR3, respectively, of a VL having an amino acid sequence of SEQ ID NO:3024. In one embodiment, the first binding domain that binds TRDV2 comprises: a VH comprising a VH CDR1, a VH CDR2, and a VH CDR3 having an amino acid sequence of a VH CDR1, a VH CDR2, and a VH CDR3, respectively, of a VH having an amino acid sequence of SEQ ID NO:3057. In one embodiment, the first binding domain that binds TRDV2 comprises: a VL comprising a VL CDR1, a VL CDR2, and a VL CDR3 having an amino acid sequence of a VL CDR1, a VL CDR2, and a VL CDR3, respectively, of a VL having an amino acid sequence of SEQ ID NO:3058. In one embodiment, the first binding domain that binds TRDV2 comprises: a VH comprising a VH CDR1, a VH CDR2, and a VH CDR3 having an amino acid sequence of a VH CDR1, a VH CDR2, and a VH CDR3, respectively, of a VH having an amino acid sequence of SEQ ID NO:3057; and a VL comprising a VL CDR1, a VL CDR2, and a VL CDR3 having an amino acid sequence of a VL CDR1, a VL CDR2, and a VL CDR3, respectively, of a VL having an amino acid sequence of SEQ ID NO:3058. In one embodiment, the first binding domain that binds TRDV2 comprises: a VH comprising a VH CDR1, a VH CDR2, and a VH CDR3 having an amino acid sequence of a VH CDR1, a VH CDR2, and a VH CDR3, respectively, of a VH having an amino acid sequence of SEQ ID NO:3091. In one embodiment, the first binding domain that binds TRDV2 comprises: a VL comprising a VL CDR1, a VL CDR2, and a VL CDR3 having an amino acid sequence of a VL CDR1, a VL CDR2, and a VL CDR3, respectively, of a VL having an amino acid sequence of SEQ ID NO:3092. In one embodiment, the first binding domain that binds TRDV2 comprises: a VH comprising a VH CDR1, a VH CDR2, and a VH CDR3 having an amino acid sequence of a VH CDR1, a VH CDR2, and a VH CDR3, respectively, of a VH having an amino acid sequence of SEQ ID NO:3091; and a VL comprising a VL CDR1, a VL CDR2, and a VL CDR3 having an amino acid sequence of a VL CDR1, a VL CDR2, and a VL CDR3, respectively, of a VL having an amino acid sequence of SEQ ID NO:3092. In one embodiment, the first binding domain that binds TRDV2 comprises: a VH comprising a VH CDR1, a VH CDR2, and a VH CDR3 having an amino acid sequence of a VH CDR1, a VH CDR2, and a VH CDR3, respectively, of a VH having an amino acid sequence of SEQ ID NO:3125. In one embodiment, the first binding domain that binds TRDV2 comprises: a VL comprising a VL CDR1, a VL CDR2, and a VL CDR3 having an amino acid sequence of a VL CDR1, a VL CDR2, and a VL CDR3, respectively, of a VL having an amino acid sequence of SEQ ID NO:3126. In one embodiment, the first binding domain that binds TRDV2 comprises: a VH comprising a VH CDR1, a VH CDR2, and a VH CDR3 having an amino acid sequence of a VH CDR1, a VH CDR2, and a VH CDR3, respectively, of a VH having an amino acid sequence of SEQ ID NO:3125; and a VL comprising a VL CDR1, a VL CDR2, and a VL CDR3 having an amino acid sequence of a VL CDR1, a VL CDR2, and a VL CDR3, respectively, of a VL having an amino acid sequence of SEQ ID NO:3126. In one embodiment, the first binding domain that binds TRDV2 comprises: a VH comprising a VH CDR1, a VH CDR2, and a VH CDR3 having an amino acid sequence of a VH CDR1, a VH CDR2, and a VH CDR3, respectively, of a VH having an amino acid sequence of SEQ ID NO:3159. In one embodiment, the first binding domain that binds TRDV2 comprises: a VL comprising a VL CDR1, a VL CDR2, and a VL CDR3 having an amino acid sequence of a VL CDR1, a VL CDR2, and a VL CDR3, respectively, of a VL having an amino acid sequence of SEQ ID NO:3160. In one embodiment, the first binding domain that binds TRDV2 comprises: a VH comprising a VH CDR1, a VH CDR2, and a VH CDR3 having an amino acid sequence of a VH CDR1, a VH CDR2, and a VH CDR3, respectively, of a VH having an amino acid sequence of SEQ ID NO:3159; and a VL comprising a VL CDR1, a VL CDR2, and a VL CDR3 having an amino acid sequence of a VL CDR1, a VL CDR2, and a VL CDR3, respectively, of a VL having an amino acid sequence of SEQ ID NO:3160. In one embodiment, the first binding domain that binds TRDV2 comprises: a VH comprising a VH CDR1, a VH CDR2, and a VH CDR3 having an amino acid sequence of a VH CDR1, a VH CDR2, and a VH CDR3, respectively, of a VH having an amino acid sequence of SEQ ID NO:3193. In one embodiment, the first binding domain that binds TRDV2 comprises: a VL comprising a VL CDR1, a VL CDR2, and a VL CDR3 having an amino acid sequence of a VL CDR1, a VL CDR2, and a VL CDR3, respectively, of a VL having an amino acid sequence of SEQ ID NO:3194. In one embodiment, the first binding domain that binds TRDV2 comprises: a VH comprising a VH CDR1, a VH CDR2, and a VH CDR3 having an amino acid sequence of a VH CDR1, a VH CDR2, and a VH CDR3, respectively, of a VH having an amino acid sequence of SEQ ID NO:3193; and a VL comprising a VL CDR1, a VL CDR2, and a VL CDR3 having an amino acid sequence of a VL CDR1, a VL CDR2, and a VL CDR3, respectively, of a VL having an amino acid sequence of SEQ ID NO:3194. In one embodiment, the first binding domain that binds TRDV2 comprises: a VH comprising a VH CDR1, a VH CDR2, and a VH CDR3 having an amino acid sequence of a VH CDR1, a VH CDR2, and a VH CDR3, respectively, of a VH having an amino acid sequence of SEQ ID NO:3227. In one embodiment, the first binding domain that binds TRDV2 comprises: a VL comprising a VL CDR1, a VL CDR2, and a VL CDR3 having an amino acid sequence of a VL CDR1, a VL CDR2, and a VL CDR3, respectively, of a VL having an amino acid sequence of SEQ ID NO:3228. In one embodiment, the first binding domain that binds TRDV2 comprises: a VH comprising a VH CDR1, a VH CDR2, and a VH CDR3 having an amino acid sequence of a VH CDR1, a VH CDR2, and a VH CDR3, respectively, of a VH having an amino acid sequence of SEQ ID NO:3227; and a VL comprising a VL CDR1, a VL CDR2, and a VL CDR3 having an amino acid sequence of a VL CDR1, a VL CDR2, and a VL CDR3, respectively, of a VL having an amino acid sequence of SEQ ID NO:3228. In one embodiment, the first binding domain that binds TRDV2 comprises: a VH comprising a VH CDR1, a VH CDR2, and a VH CDR3 having an amino acid sequence of a VH CDR1, a VH CDR2, and a VH CDR3, respectively, of a VH having an amino acid sequence of SEQ ID NO:3261. In one embodiment, the first binding domain that binds TRDV2 comprises: a VL comprising a VL CDR1, a VL CDR2, and a VL CDR3 having an amino acid sequence of a VL CDR1, a VL CDR2, and a VL CDR3, respectively, of a VL having an amino acid sequence of SEQ ID NO:3262. In one embodiment, the first binding domain that binds TRDV2 comprises: a VH comprising a VH CDR1, a VH CDR2, and a VH CDR3 having an amino acid sequence of a VH CDR1, a VH CDR2, and a VH CDR3, respectively, of a VH having an amino acid sequence of SEQ ID NO:3261; and a VL comprising a VL CDR1, a VL CDR2, and a VL CDR3 having an amino acid sequence of a VL CDR1, a VL CDR2, and a VL CDR3, respectively, of a VL having an amino acid sequence of SEQ ID NO:3262. In one embodiment, the first binding domain that binds TRDV2 comprises: a VH comprising a VH CDR1, a VH CDR2, and a VH CDR3 having an amino acid sequence of a VH CDR1, a VH CDR2, and a VH CDR3, respectively, of a VH having an amino acid sequence of SEQ ID NO:3295. In one embodiment, the first binding domain that binds TRDV2 comprises: a VL comprising a VL CDR1, a VL CDR2, and a VL CDR3 having an amino acid sequence of a VL CDR1, a VL CDR2, and a VL CDR3, respectively, of a VL having an amino acid sequence of SEQ ID NO:3296. In one embodiment, the first binding domain that binds TRDV2 comprises: a VH comprising a VH CDR1, a VH CDR2, and a VH CDR3 having an amino acid sequence of a VH CDR1, a VH CDR2, and a VH CDR3, respectively, of a VH having an amino acid sequence of SEQ ID NO:3295; and a VL comprising a VL CDR1, a VL CDR2, and a VL CDR3 having an amino acid sequence of a VL CDR1, a VL CDR2, and a VL CDR3, respectively, of a VL having an amino acid sequence of SEQ ID NO:3296. In one embodiment, the first binding domain that binds TRDV2 comprises: a VH comprising a VH CDR1, a VH CDR2, and a VH CDR3 having an amino acid sequence of a VH CDR1, a VH CDR2, and a VH CDR3, respectively, of a VH having an amino acid sequence of SEQ ID NO:3329. In one embodiment, the first binding domain that binds TRDV2 comprises: a VL comprising a VL CDR1, a VL CDR2, and a VL CDR3 having an amino acid sequence of a VL CDR1, a VL CDR2, and a VL CDR3, respectively, of a VL having an amino acid sequence of SEQ ID NO:3330. In one embodiment, the first binding domain that binds TRDV2 comprises: a VH comprising a VH CDR1, a VH CDR2, and a VH CDR3 having an amino acid sequence of a VH CDR1, a VH CDR2, and a VH CDR3, respectively, of a VH having an amino acid sequence of SEQ ID NO:3329; and a VL comprising a VL CDR1, a VL CDR2, and a VL CDR3 having an amino acid sequence of a VL CDR1, a VL CDR2, and a VL CDR3, respectively, of a VL having an amino acid sequence of SEQ ID NO:3330. In one embodiment, the first binding domain that binds TRDV2 comprises: a VH comprising a VH CDR1, a VH CDR2, and a VH CDR3 having an amino acid sequence of a VH CDR1, a VH CDR2, and a VH CDR3, respectively, of a VH having an amino acid sequence of SEQ ID NO:3363. In one embodiment, the first binding domain that binds TRDV2 comprises: a VL comprising a VL CDR1, a VL CDR2, and a VL CDR3 having an amino acid sequence of a VL CDR1, a VL CDR2, and a VL CDR3, respectively, of a VL having an amino acid sequence of SEQ ID NO:3364. In one embodiment, the first binding domain that binds TRDV2 comprises: a VH comprising a VH CDR1, a VH CDR2, and a VH CDR3 having an amino acid sequence of a VH CDR1, a VH CDR2, and a VH CDR3, respectively, of a VH having an amino acid sequence of SEQ ID NO:3363; and a VL comprising a VL CDR1, a VL CDR2, and a VL CDR3 having an amino acid sequence of a VL CDR1, a VL CDR2, and a VL CDR3, respectively, of a VL having an amino acid sequence of SEQ ID NO:3364. In one embodiment, the first binding domain that binds TRDV2 comprises: a VH comprising a VH CDR1, a VH CDR2, and a VH CDR3 having an amino acid sequence of a VH CDR1, a VH CDR2, and a VH CDR3, respectively, of a VH having an amino acid sequence of SEQ ID NO:3397. In one embodiment, the first binding domain that binds TRDV2 comprises: a VL comprising a VL CDR1, a VL CDR2, and a VL CDR3 having an amino acid sequence of a VL CDR1, a VL CDR2, and a VL CDR3, respectively, of a VL having an amino acid sequence of SEQ ID NO:3398. In one embodiment, the first binding domain that binds TRDV2 comprises: a VH comprising a VH CDR1, a VH CDR2, and a VH CDR3 having an amino acid sequence of a VH CDR1, a VH CDR2, and a VH CDR3, respectively, of a VH having an amino acid sequence of SEQ ID NO:3397; and a VL comprising a VL CDR1, a VL CDR2, and a VL CDR3 having an amino acid sequence of a VL CDR1, a VL CDR2, and a VL CDR3, respectively, of a VL having an amino acid sequence of SEQ ID NO:3398. In one embodiment, the first binding domain that binds TRDV2 comprises: a VH comprising a VH CDR1, a VH CDR2, and a VH CDR3 having an amino acid sequence of a VH CDR1, a VH CDR2, and a VH CDR3, respectively, of a VH having an amino acid sequence of SEQ ID NO:3431. In one embodiment, the first binding domain that binds TRDV2 comprises: a VL comprising a VL CDR1, a VL CDR2, and a VL CDR3 having an amino acid sequence of a VL CDR1, a VL CDR2, and a VL CDR3, respectively, of a VL having an amino acid sequence of SEQ ID NO:3432. In one embodiment, the first binding domain that binds TRDV2 comprises: a VH comprising a VH CDR1, a VH CDR2, and a VH CDR3 having an amino acid sequence of a VH CDR1, a VH CDR2, and a VH CDR3, respectively, of a VH having an amino acid sequence of SEQ ID NO:3431; and a VL comprising a VL CDR1, a VL CDR2, and a VL CDR3 having an amino acid sequence of a VL CDR1, a VL CDR2, and a VL CDR3, respectively, of a VL having an amino acid sequence of SEQ ID NO:3432. In one embodiment, the first binding domain that binds TRDV2 comprises: a VH comprising a VH CDR1, a VH CDR2, and a VH CDR3 having an amino acid sequence of a VH CDR1, a VH CDR2, and a VH CDR3, respectively, of a VH having an amino acid sequence of SEQ ID NO:3465. In one embodiment, the first binding domain that binds TRDV2 comprises: a VL comprising a VL CDR1, a VL CDR2, and a VL CDR3 having an amino acid sequence of a VL CDR1, a VL CDR2, and a VL CDR3, respectively, of a VL having an amino acid sequence of SEQ ID NO:3466. In one embodiment, the first binding domain that binds TRDV2 comprises: a VH comprising a VH CDR1, a VH CDR2, and a VH CDR3 having an amino acid sequence of a VH CDR1, a VH CDR2, and a VH CDR3, respectively, of a VH having an amino acid sequence of SEQ ID NO:3465; and a VL comprising a VL CDR1, a VL CDR2, and a VL CDR3 having an amino acid sequence of a VL CDR1, a VL CDR2, and a VL CDR3, respectively, of a VL having an amino acid sequence of SEQ ID NO:3466. In one embodiment, the first binding domain that binds TRDV2 comprises: a VH comprising a VH CDR1, a VH CDR2, and a VH CDR3 having an amino acid sequence of a VH CDR1, a VH CDR2, and a VH CDR3, respectively, of a VH having an amino acid sequence of SEQ ID NO:3499. In one embodiment, the first binding domain that binds TRDV2 comprises: a VL comprising a VL CDR1, a VL CDR2, and a VL CDR3 having an amino acid sequence of a VL CDR1, a VL CDR2, and a VL CDR3, respectively, of a VL having an amino acid sequence of SEQ ID NO:3500. In one embodiment, the first binding domain that binds TRDV2 comprises: a VH comprising a VH CDR1, a VH CDR2, and a VH CDR3 having an amino acid sequence of a VH CDR1, a VH CDR2, and a VH CDR3, respectively, of a VH having an amino acid sequence of SEQ ID NO:3499; and a VL comprising a VL CDR1, a VL CDR2, and a VL CDR3 having an amino acid sequence of a VL CDR1, a VL CDR2, and a VL CDR3, respectively, of a VL having an amino acid sequence of SEQ ID NO:3500. In one embodiment, the first binding domain that binds TRDV2 comprises: a VH comprising a VH CDR1, a VH CDR2, and a VH CDR3 having an amino acid sequence of a VH CDR1, a VH CDR2, and a VH CDR3, respectively, of a VH having an amino acid sequence of SEQ ID NO:3533. In one embodiment, the first binding domain that binds TRDV2 comprises: a VL comprising a VL CDR1, a VL CDR2, and a VL CDR3 having an amino acid sequence of a VL CDR1, a VL CDR2, and a VL CDR3, respectively, of a VL having an amino acid sequence of SEQ ID NO:3534. In one embodiment, the first binding domain that binds TRDV2 comprises: a VH comprising a VH CDR1, a VH CDR2, and a VH CDR3 having an amino acid sequence of a VH CDR1, a VH CDR2, and a VH CDR3, respectively, of a VH having an amino acid sequence of SEQ ID NO:3533; and a VL comprising a VL CDR1, a VL CDR2, and a VL CDR3 having an amino acid sequence of a VL CDR1, a VL CDR2, and a VL CDR3, respectively, of a VL having an amino acid sequence of SEQ ID NO:3534. In one embodiment, the first binding domain that binds TRDV2 comprises: a VH comprising a VH CDR1, a VH CDR2, and a VH CDR3 having an amino acid sequence of a VH CDR1, a VH CDR2, and a VH CDR3, respectively, of a VH having an amino acid sequence of SEQ ID NO:3567. In one embodiment, the first binding domain that binds TRDV2 comprises: a VL comprising a VL CDR1, a VL CDR2, and a VL CDR3 having an amino acid sequence of a VL CDR1, a VL CDR2, and a VL CDR3, respectively, of a VL having an amino acid sequence of SEQ ID NO:3568. In one embodiment, the first binding domain that binds TRDV2 comprises: a VH comprising a VH CDR1, a VH CDR2, and a VH CDR3 having an amino acid sequence of a VH CDR1, a VH CDR2, and a VH CDR3, respectively, of a VH having an amino acid sequence of SEQ ID NO:3567; and a VL comprising a VL CDR1, a VL CDR2, and a VL CDR3 having an amino acid sequence of a VL CDR1, a VL CDR2, and a VL CDR3, respectively, of a VL having an amino acid sequence of SEQ ID NO:3568. In one embodiment, the first binding domain that binds TRDV2 comprises: a VH comprising a VH CDR1, a VH CDR2, and a VH CDR3 having an amino acid sequence of a VH CDR1, a VH CDR2, and a VH CDR3, respectively, of a VH having an amino acid sequence of SEQ ID NO:3601. In one embodiment, the first binding domain that binds TRDV2 comprises: a VL comprising a VL CDR1, a VL CDR2, and a VL CDR3 having an amino acid sequence of a VL CDR1, a VL CDR2, and a VL CDR3, respectively, of a VL having an amino acid sequence of SEQ ID NO:3602. In one embodiment, the first binding domain that binds TRDV2 comprises: a VH comprising a VH CDR1, a VH CDR2, and a VH CDR3 having an amino acid sequence of a VH CDR1, a VH CDR2, and a VH CDR3, respectively, of a VH having an amino acid sequence of SEQ ID NO:3601; and a VL comprising a VL CDR1, a VL CDR2, and a VL CDR3 having an amino acid sequence of a VL CDR1, a VL CDR2, and a VL CDR3, respectively, of a VL having an amino acid sequence of SEQ ID NO:3602. In one embodiment, the first binding domain that binds TRDV2 comprises: a VH comprising a VH CDR1, a VH CDR2, and a VH CDR3 having an amino acid sequence of a VH CDR1, a VH CDR2, and a VH CDR3, respectively, of a VH having an amino acid sequence of SEQ ID NO:3635. In one embodiment, the first binding domain that binds TRDV2 comprises: a VL comprising a VL CDR1, a VL CDR2, and a VL CDR3 having an amino acid sequence of a VL CDR1, a VL CDR2, and a VL CDR3, respectively, of a VL having an amino acid sequence of SEQ ID NO:3636. In one embodiment, the first binding domain that binds TRDV2 comprises: a VH comprising a VH CDR1, a VH CDR2, and a VH CDR3 having an amino acid sequence of a VH CDR1, a VH CDR2, and a VH CDR3, respectively, of a VH having an amino acid sequence of SEQ ID NO:3635; and a VL comprising a VL CDR1, a VL CDR2, and a VL CDR3 having an amino acid sequence of a VL CDR1, a VL CDR2, and a VL CDR3, respectively, of a VL having an amino acid sequence of SEQ ID NO:3636. In one embodiment, the first binding domain that binds TRDV2 comprises: a VH comprising a VH CDR1, a VH CDR2, and a VH CDR3 having an amino acid sequence of a VH CDR1, a VH CDR2, and a VH CDR3, respectively, of a VH having an amino acid sequence of SEQ ID NO:3669. In one embodiment, the first binding domain that binds TRDV2 comprises: a VL comprising a VL CDR1, a VL CDR2, and a VL CDR3 having an amino acid sequence of a VL CDR1, a VL CDR2, and a VL CDR3, respectively, of a VL having an amino acid sequence of SEQ ID NO:3670. In one embodiment, the first binding domain that binds TRDV2 comprises: a VH comprising a VH CDR1, a VH CDR2, and a VH CDR3 having an amino acid sequence of a VH CDR1, a VH CDR2, and a VH CDR3, respectively, of a VH having an amino acid sequence of SEQ ID NO:3669; and a VL comprising a VL CDR1, a VL CDR2, and a VL CDR3 having an amino acid sequence of a VL CDR1, a VL CDR2, and a VL CDR3, respectively, of a VL having an amino acid sequence of SEQ ID NO:3670. In one embodiment, the first binding domain that binds TRDV2 comprises: a VH comprising a VH CDR1, a VH CDR2, and a VH CDR3 having an amino acid sequence of a VH CDR1, a VH CDR2, and a VH CDR3, respectively, of a VH having an amino acid sequence of SEQ ID NO:3703. In one embodiment, the first binding domain that binds TRDV2 comprises: a VL comprising a VL CDR1, a VL CDR2, and a VL CDR3 having an amino acid sequence of a VL CDR1, a VL CDR2, and a VL CDR3, respectively, of a VL having an amino acid sequence of SEQ ID NO:3704. In one embodiment, the first binding domain that binds TRDV2 comprises: a VH comprising a VH CDR1, a VH CDR2, and a VH CDR3 having an amino acid sequence of a VH CDR1, a VH CDR2, and a VH CDR3, respectively, of a VH having an amino acid sequence of SEQ ID NO:3703; and a VL comprising a VL CDR1, a VL CDR2, and a VL CDR3 having an amino acid sequence of a VL CDR1, a VL CDR2, and a VL CDR3, respectively, of a VL having an amino acid sequence of SEQ ID NO:3704. In one embodiment, the first binding domain that binds TRDV2 comprises: a VH comprising a VH CDR1, a VH CDR2, and a VH CDR3 having an amino acid sequence of a VH CDR1, a VH CDR2, and a VH CDR3, respectively, of a VH having an amino acid sequence of SEQ ID NO:3737. In one embodiment, the first binding domain that binds TRDV2 comprises: a VL comprising a VL CDR1, a VL CDR2, and a VL CDR3 having an amino acid sequence of a VL CDR1, a VL CDR2, and a VL CDR3, respectively, of a VL having an amino acid sequence of SEQ ID NO:3738. In one embodiment, the first binding domain that binds TRDV2 comprises: a VH comprising a VH CDR1, a VH CDR2, and a VH CDR3 having an amino acid sequence of a VH CDR1, a VH CDR2, and a VH CDR3, respectively, of a VH having an amino acid sequence of SEQ ID NO:3737; and a VL comprising a VL CDR1, a VL CDR2, and a VL CDR3 having an amino acid sequence of a VL CDR1, a VL CDR2, and a VL CDR3, respectively, of a VL having an amino acid sequence of SEQ ID NO:3738. In one embodiment, the first binding domain that binds TRDV2 comprises: a VH comprising a VH CDR1, a VH CDR2, and a VH CDR3 having an amino acid sequence of a VH CDR1, a VH CDR2, and a VH CDR3, respectively, of a VH having an amino acid sequence of SEQ ID NO:3771. In one embodiment, the first binding domain that binds TRDV2 comprises: a VL comprising a VL CDR1, a VL CDR2, and a VL CDR3 having an amino acid sequence of a VL CDR1, a VL CDR2, and a VL CDR3, respectively, of a VL having an amino acid sequence of SEQ ID NO:3772. In one embodiment, the first binding domain that binds TRDV2 comprises: a VH comprising a VH CDR1, a VH CDR2, and a VH CDR3 having an amino acid sequence of a VH CDR1, a VH CDR2, and a VH CDR3, respectively, of a VH having an amino acid sequence of SEQ ID NO:3771; and a VL comprising a VL CDR1, a VL CDR2, and a VL CDR3 having an amino acid sequence of a VL CDR1, a VL CDR2, and a VL CDR3, respectively, of a VL having an amino acid sequence of SEQ ID NO:3772. In one embodiment, the first binding domain that binds TRDV2 comprises: a VH comprising a VH CDR1, a VH CDR2, and a VH CDR3 having an amino acid sequence of a VH CDR1, a VH CDR2, and a VH CDR3, respectively, of a VH having an amino acid sequence of SEQ ID NO:3805. In one embodiment, the first binding domain that binds TRDV2 comprises: a VL comprising a VL CDR1, a VL CDR2, and a VL CDR3 having an amino acid sequence of a VL CDR1, a VL CDR2, and a VL CDR3, respectively, of a VL having an amino acid sequence of SEQ ID NO:3806. In one embodiment, the first binding domain that binds TRDV2 comprises: a VH comprising a VH CDR1, a VH CDR2, and a VH CDR3 having an amino acid sequence of a VH CDR1, a VH CDR2, and a VH CDR3, respectively, of a VH having an amino acid sequence of SEQ ID NO:3805; and a VL comprising a VL CDR1, a VL CDR2, and a VL CDR3 having an amino acid sequence of a VL CDR1, a VL CDR2, and a VL CDR3, respectively, of a VL having an amino acid sequence of SEQ ID NO:3806. In one embodiment, the first binding domain that binds TRDV2 comprises: a VH comprising a VH CDR1, a VH CDR2, and a VH CDR3 having an amino acid sequence of a VH CDR1, a VH CDR2, and a VH CDR3, respectively, of a VH having an amino acid sequence of SEQ ID NO:3839. In one embodiment, the first binding domain that binds TRDV2 comprises: a VL comprising a VL CDR1, a VL CDR2, and a VL CDR3 having an amino acid sequence of a VL CDR1, a VL CDR2, and a VL CDR3, respectively, of a VL having an amino acid sequence of SEQ ID NO:3840. In one embodiment, the first binding domain that binds TRDV2 comprises: a VH comprising a VH CDR1, a VH CDR2, and a VH CDR3 having an amino acid sequence of a VH CDR1, a VH CDR2, and a VH CDR3, respectively, of a VH having an amino acid sequence of SEQ ID NO:3839; and a VL comprising a VL CDR1, a VL CDR2, and a VL CDR3 having an amino acid sequence of a VL CDR1, a VL CDR2, and a VL CDR3, respectively, of a VL having an amino acid sequence of SEQ ID NO:3840. In one embodiment, the first binding domain that binds TRDV2 comprises: a VH comprising a VH CDR1, a VH CDR2, and a VH CDR3 having an amino acid sequence of a VH CDR1, a VH CDR2, and a VH CDR3, respectively, of a VH having an amino acid sequence of SEQ ID NO:3873. In one embodiment, the first binding domain that binds TRDV2 comprises: a VL comprising a VL CDR1, a VL CDR2, and a VL CDR3 having an amino acid sequence of a VL CDR1, a VL CDR2, and a VL CDR3, respectively, of a VL having an amino acid sequence of SEQ ID NO:3874. In one embodiment, the first binding domain that binds TRDV2 comprises: a VH comprising a VH CDR1, a VH CDR2, and a VH CDR3 having an amino acid sequence of a VH CDR1, a VH CDR2, and a VH CDR3, respectively, of a VH having an amino acid sequence of SEQ ID NO:3873; and a VL comprising a VL CDR1, a VL CDR2, and a VL CDR3 having an amino acid sequence of a VL CDR1, a VL CDR2, and a VL CDR3, respectively, of a VL having an amino acid sequence of SEQ ID NO:3874. In one embodiment, the first binding domain that binds TRDV2 comprises: a VH comprising a VH CDR1, a VH CDR2, and a VH CDR3 having an amino acid sequence of a VH CDR1, a VH CDR2, and a VH CDR3, respectively, of a VH having an amino acid sequence of SEQ ID NO:3907. In one embodiment, the first binding domain that binds TRDV2 comprises: a VL comprising a VL CDR1, a VL CDR2, and a VL CDR3 having an amino acid sequence of a VL CDR1, a VL CDR2, and a VL CDR3, respectively, of a VL having an amino acid sequence of SEQ ID NO:3908. In one embodiment, the first binding domain that binds TRDV2 comprises: a VH comprising a VH CDR1, a VH CDR2, and a VH CDR3 having an amino acid sequence of a VH CDR1, a VH CDR2, and a VH CDR3, respectively, of a VH having an amino acid sequence of SEQ ID NO:3907; and a VL comprising a VL CDR1, a VL CDR2, and a VL CDR3 having an amino acid sequence of a VL CDR1, a VL CDR2, and a VL CDR3, respectively, of a VL having an amino acid sequence of SEQ ID NO:3908. In one embodiment, the first binding domain that binds TRDV2 comprises: a VH comprising a VH CDR1, a VH CDR2, and a VH CDR3 having an amino acid sequence of a VH CDR1, a VH CDR2, and a VH CDR3, respectively, of a VH having an amino acid sequence of SEQ ID NO:3941. In one embodiment, the first binding domain that binds TRDV2 comprises: a VL comprising a VL CDR1, a VL CDR2, and a VL CDR3 having an amino acid sequence of a VL CDR1, a VL CDR2, and a VL CDR3, respectively, of a VL having an amino acid sequence of SEQ ID NO:3942. In one embodiment, the first binding domain that binds TRDV2 comprises: a VH comprising a VH CDR1, a VH CDR2, and a VH CDR3 having an amino acid sequence of a VH CDR1, a VH CDR2, and a VH CDR3, respectively, of a VH having an amino acid sequence of SEQ ID NO:3941; and a VL comprising a VL CDR1, a VL CDR2, and a VL CDR3 having an amino acid sequence of a VL CDR1, a VL CDR2, and a VL CDR3, respectively, of a VL having an amino acid sequence of SEQ ID NO:3942. In one embodiment, the first binding domain that binds TRDV2 comprises: a VH comprising a VH CDR1, a VH CDR2, and a VH CDR3 having an amino acid sequence of a VH CDR1, a VH CDR2, and a VH CDR3, respectively, of a VH having an amino acid sequence of SEQ ID NO:3975. In one embodiment, the first binding domain that binds TRDV2 comprises: a VL comprising a VL CDR1, a VL CDR2, and a VL CDR3 having an amino acid sequence of a VL CDR1, a VL CDR2, and a VL CDR3, respectively, of a VL having an amino acid sequence of SEQ ID NO:3976. In one embodiment, the first binding domain that binds TRDV2 comprises: a VH comprising a VH CDR1, a VH CDR2, and a VH CDR3 having an amino acid sequence of a VH CDR1, a VH CDR2, and a VH CDR3, respectively, of a VH having an amino acid sequence of SEQ ID NO:3975; and a VL comprising a VL CDR1, a VL CDR2, and a VL CDR3 having an amino acid sequence of a VL CDR1, a VL CDR2, and a VL CDR3, respectively, of a VL having an amino acid sequence of SEQ ID NO:3976. In one embodiment, the first binding domain that binds TRDV2 comprises: a VH comprising a VH CDR1, a VH CDR2, and a VH CDR3 having an amino acid sequence of a VH CDR1, a VH CDR2, and a VH CDR3, respectively, of a VH having an amino acid sequence of SEQ ID NO:4009. In one embodiment, the first binding domain that binds TRDV2 comprises: a VL comprising a VL CDR1, a VL CDR2, and a VL CDR3 having an amino acid sequence of a VL CDR1, a VL CDR2, and a VL CDR3, respectively, of a VL having an amino acid sequence of SEQ ID NO:4010. In one embodiment, the first binding domain that binds TRDV2 comprises: a VH comprising a VH CDR1, a VH CDR2, and a VH CDR3 having an amino acid sequence of a VH CDR1, a VH CDR2, and a VH CDR3, respectively, of a VH having an amino acid sequence of SEQ ID NO:4009; and a VL comprising a VL CDR1, a VL CDR2, and a VL CDR3 having an amino acid sequence of a VL CDR1, a VL CDR2, and a VL CDR3, respectively, of a VL having an amino acid sequence of SEQ ID NO:4010. In one embodiment, the first binding domain that binds TRDV2 comprises: a VH comprising a VH CDR1, a VH CDR2, and a VH CDR3 having an amino acid sequence of a VH CDR1, a VH CDR2, and a VH CDR3, respectively, of a VH having an amino acid sequence of SEQ ID NO:4043. In one embodiment, the first binding domain that binds TRDV2 comprises: a VL comprising a VL CDR1, a VL CDR2, and a VL CDR3 having an amino acid sequence of a VL CDR1, a VL CDR2, and a VL CDR3, respectively, of a VL having an amino acid sequence of SEQ ID NO:4044. In one embodiment, the first binding domain that binds TRDV2 comprises: a VH comprising a VH CDR1, a VH CDR2, and a VH CDR3 having an amino acid sequence of a VH CDR1, a VH CDR2, and a VH CDR3, respectively, of a VH having an amino acid sequence of SEQ ID NO:4043; and a VL comprising a VL CDR1, a VL CDR2, and a VL CDR3 having an amino acid sequence of a VL CDR1, a VL CDR2, and a VL CDR3, respectively, of a VL having an amino acid sequence of SEQ ID NO:4044. In one embodiment, the first binding domain that binds TRDV2 comprises: a VH comprising a VH CDR1, a VH CDR2, and a VH CDR3 having an amino acid sequence of a VH CDR1, a VH CDR2, and a VH CDR3, respectively, of a VH having an amino acid sequence of SEQ ID NO:4077. In one embodiment, the first binding domain that binds TRDV2 comprises: a VL comprising a VL CDR1, a VL CDR2, and a VL CDR3 having an amino acid sequence of a VL CDR1, a VL CDR2, and a VL CDR3, respectively, of a VL having an amino acid sequence of SEQ ID NO:4078. In one embodiment, the first binding domain that binds TRDV2 comprises: a VH comprising a VH CDR1, a VH CDR2, and a VH CDR3 having an amino acid sequence of a VH CDR1, a VH CDR2, and a VH CDR3, respectively, of a VH having an amino acid sequence of SEQ ID NO:4077; and a VL comprising a VL CDR1, a VL CDR2, and a VL CDR3 having an amino acid sequence of a VL CDR1, a VL CDR2, and a VL CDR3, respectively, of a VL having an amino acid sequence of SEQ ID NO:4078. In one embodiment, the first binding domain that binds TRDV2 comprises: a VH comprising a VH CDR1, a VH CDR2, and a VH CDR3 having an amino acid sequence of a VH CDR1, a VH CDR2, and a VH CDR3, respectively, of a VH having an amino acid sequence of SEQ ID NO:4111. In one embodiment, the first binding domain that binds TRDV2 comprises: a VL comprising a VL CDR1, a VL CDR2, and a VL CDR3 having an amino acid sequence of a VL CDR1, a VL CDR2, and a VL CDR3, respectively, of a VL having an amino acid sequence of SEQ ID NO:4112. In one embodiment, the first binding domain that binds TRDV2 comprises: a VH comprising a VH CDR1, a VH CDR2, and a VH CDR3 having an amino acid sequence of a VH CDR1, a VH CDR2, and a VH CDR3, respectively, of a VH having an amino acid sequence of SEQ ID NO:4111; and a VL comprising a VL CDR1, a VL CDR2, and a VL CDR3 having an amino acid sequence of a VL CDR1, a VL CDR2, and a VL CDR3, respectively, of a VL having an amino acid sequence of SEQ ID NO:4112.

[0263] In another aspect, provided herein is a multispecific antibody that binds TRGDC. In some embodiments, the multispecific antibody is a bispecific antibody. In some embodiments, the multispecific antibody is a trispecific antibody. In some embodiments, the multispecific antibody is a quadraspecific antibody. In one embodiment, the multispecific TRGDC antibody comprises: (a) a first binding domain that binds TRGDC, and (b) a second binding domain that binds to a second target. In one embodiment, the multispecific TRGDC antibody comprises: (a) a first binding domain that binds TRGDC, and (b) a second binding domain that binds to a second target, and (c) a third binding domain that binds to a third target. In one embodiment, the multispecific TRGDC antibody comprises: (a) a first binding domain that binds TRGDC, and (b) a second binding domain that binds to a second target, (c) a third binding domain that binds to a third target, and (d) a fourth binding domain that binds to a fourth target.

[0264] In one embodiment, the first binding domain that binds TRGDC comprises: a VH comprising a VH CDR1, a VH CDR2, and a VH CDR3 having an amino acid sequence of a VH CDR1, a VH CDR2, and a VH CDR3, respectively, of a VH having an amino acid sequence of SEQ ID NO:4145. In one embodiment, the first binding domain that binds TRGDC comprises: a VL comprising a VL CDR1, a VL CDR2, and a VL CDR3 having an amino acid sequence of a VL CDR1, a VL CDR2, and a VL CDR3, respectively, of a VL having an amino acid sequence of SEQ ID NO:4146. In one embodiment, the first binding domain that binds TRGDC comprises: a VH comprising a VH CDR1, a VH CDR2, and a VH CDR3 having an amino acid sequence of a VH CDR1, a VH CDR2, and a VH CDR3, respectively, of a VH having an amino acid sequence of SEQ ID NO:4145; and a VL comprising a VL CDR1, a VL CDR2, and a VL CDR3 having an amino acid sequence of a VL CDR1, a VL CDR2, and a VL CDR3, respectively, of a VL having an amino acid sequence of SEQ ID NO:4146. In one embodiment, the first binding domain that binds TRGDC comprises: a VH comprising a VH CDR1, a VH CDR2, and a VH CDR3 having an amino acid sequence of a VH CDR1, a VH CDR2, and a VH CDR3, respectively, of a VH having an amino acid sequence of SEQ ID NO:4179. In one embodiment, the first binding domain that binds TRGDC comprises: a VL comprising a VL CDR1, a VL CDR2, and a VL CDR3 having an amino acid sequence of a VL CDR1, a VL CDR2, and a VL CDR3, respectively, of a VL having an amino acid sequence of SEQ ID NO:4180. In one embodiment, the first binding domain that binds TRGDC comprises: a VH comprising a VH CDR1, a VH CDR2, and a VH CDR3 having an amino acid sequence of a VH CDR1, a VH CDR2, and a VH CDR3, respectively, of a VH having an amino acid sequence of SEQ ID NO:4179; and a VL comprising a VL CDR1, a VL CDR2, and a VL CDR3 having an amino acid sequence of a VL CDR1, a VL CDR2, and a VL CDR3, respectively, of a VL having an amino acid sequence of SEQ ID NO:4180. In one embodiment, the first binding domain that binds TRGDC comprises: a VH comprising a VH CDR1, a VH CDR2, and a VH CDR3 having an amino acid sequence of a VH CDR1, a VH CDR2, and a VH CDR3, respectively, of a VH having an amino acid sequence of SEQ ID NO:4213. In one embodiment, the first binding domain that binds TRGDC comprises: a VL comprising a VL CDR1, a VL CDR2, and a VL CDR3 having an amino acid sequence of a VL CDR1, a VL CDR2, and a VL CDR3, respectively, of a VL having an amino acid sequence of SEQ ID NO:4214. In one embodiment, the first binding domain that binds TRGDC comprises: a VH comprising a VH CDR1, a VH CDR2, and a VH CDR3 having an amino acid sequence of a VH CDR1, a VH CDR2, and a VH CDR3, respectively, of a VH having an amino acid sequence of SEQ ID NO:4213; and a VL comprising a VL CDR1, a VL CDR2, and a VL CDR3 having an amino acid sequence of a VL CDR1, a VL CDR2, and a VL CDR3, respectively, of a VL having an amino acid sequence of SEQ ID NO:4214. In one embodiment, the first binding domain that binds TRGDC comprises: a VH comprising a VH CDR1, a VH CDR2, and a VH CDR3 having an amino acid sequence of a VH CDR1, a VH CDR2, and a VH CDR3, respectively, of a VH having an amino acid sequence of SEQ ID NO:4247. In one embodiment, the first binding domain that binds TRGDC comprises: a VL comprising a VL CDR1, a VL CDR2, and a VL CDR3 having an amino acid sequence of a VL CDR1, a VL CDR2, and a VL CDR3, respectively, of a VL having an amino acid sequence of SEQ ID NO:4248. In one embodiment, the first binding domain that binds TRGDC comprises: a VH comprising a VH CDR1, a VH CDR2, and a VH CDR3 having an amino acid sequence of a VH CDR1, a VH CDR2, and a VH CDR3, respectively, of a VH having an amino acid sequence of SEQ ID NO:4247; and a VL comprising a VL CDR1, a VL CDR2, and a VL CDR3 having an amino acid sequence of a VL CDR1, a VL CDR2, and a VL CDR3, respectively, of a VL having an amino acid sequence of SEQ ID NO:4248. In one embodiment, the first binding domain that binds TRGDC comprises: a VH comprising a VH CDR1, a VH CDR2, and a VH CDR3 having an amino acid sequence of a VH CDR1, a VH CDR2, and a VH CDR3, respectively, of a VH having an amino acid sequence of SEQ ID NO:4281. In one embodiment, the first binding domain that binds TRGDC comprises: a VL comprising a VL CDR1, a VL CDR2, and a VL CDR3 having an amino acid sequence of a VL CDR1, a VL CDR2, and a VL CDR3, respectively, of a VL having an amino acid sequence of SEQ ID NO:4282. In one embodiment, the first binding domain that binds TRGDC comprises: a VH comprising a VH CDR1, a VH CDR2, and a VH CDR3 having an amino acid sequence of a VH CDR1, a VH CDR2, and a VH CDR3, respectively, of a VH having an amino acid sequence of SEQ ID NO:4281; and a VL comprising a VL CDR1, a VL CDR2, and a VL CDR3 having an amino acid sequence of a VL CDR1, a VL CDR2, and a VL CDR3, respectively, of a VL having an amino acid sequence of SEQ ID NO:4282. In one embodiment, the first binding domain that binds TRGDC comprises: a VH comprising a VH CDR1, a VH CDR2, and a VH CDR3 having an amino acid sequence of a VH CDR1, a VH CDR2, and a VH CDR3, respectively, of a VH having an amino acid sequence of SEQ ID NO:4315. In one embodiment, the first binding domain that binds TRGDC comprises: a VL comprising a VL CDR1, a VL CDR2, and a VL CDR3 having an amino acid sequence of a VL CDR1, a VL CDR2, and a VL CDR3, respectively, of a VL having an amino acid sequence of SEQ ID NO:4316. In one embodiment, the first binding domain that binds TRGDC comprises: a VH comprising a VH CDR1, a VH CDR2, and a VH CDR3 having an amino acid sequence of a VH CDR1, a VH CDR2, and a VH CDR3, respectively, of a VH having an amino acid sequence of SEQ ID NO:4315; and a VL comprising a VL CDR1, a VL CDR2, and a VL CDR3 having an amino acid sequence of a VL CDR1, a VL CDR2, and a VL CDR3, respectively, of a VL having an amino acid sequence of SEQ ID NO:4316. In one embodiment, the first binding domain that binds TRGDC comprises: a VH comprising a VH CDR1, a VH CDR2, and a VH CDR3 having an amino acid sequence of a VH CDR1, a VH CDR2, and a VH CDR3, respectively, of a VH having an amino acid sequence of SEQ ID NO:4349. In one embodiment, the first binding domain that binds TRGDC comprises: a VL comprising a VL CDR1, a VL CDR2, and a VL CDR3 having an amino acid sequence of a VL CDR1, a VL CDR2, and a VL CDR3, respectively, of a VL having an amino acid sequence of SEQ ID NO:4350. In one embodiment, the first binding domain that binds TRGDC comprises: a VH comprising a VH CDR1, a VH CDR2, and a VH CDR3 having an amino acid sequence of a VH CDR1, a VH CDR2, and a VH CDR3, respectively, of a VH having an amino acid sequence of SEQ ID NO:4349; and a VL comprising a VL CDR1, a VL CDR2, and a VL CDR3 having an amino acid sequence of a VL CDR1, a VL CDR2, and a VL CDR3, respectively, of a VL having an amino acid sequence of SEQ ID NO:4350. In one embodiment, the first binding domain that binds TRGDC comprises: a VH comprising a VH CDR1, a VH CDR2, and a VH CDR3 having an amino acid sequence of a VH CDR1, a VH CDR2, and a VH CDR3, respectively, of a VH having an amino acid sequence of SEQ ID NO:4383. In one embodiment, the first binding domain that binds TRGDC comprises: a VL comprising a VL CDR1, a VL CDR2, and a VL CDR3 having an amino acid sequence of a VL CDR1, a VL CDR2, and a VL CDR3, respectively, of a VL having an amino acid sequence of SEQ ID NO:4384. In one embodiment, the first binding domain that binds TRGDC comprises: a VH comprising a VH CDR1, a VH CDR2, and a VH CDR3 having an amino acid sequence of a VH CDR1, a VH CDR2, and a VH CDR3, respectively, of a VH having an amino acid sequence of SEQ ID NO:4383; and a VL comprising a VL CDR1, a VL CDR2, and a VL CDR3 having an amino acid sequence of a VL CDR1, a VL CDR2, and a VL CDR3, respectively, of a VL having an amino acid sequence of SEQ ID NO:4384. In one embodiment, the first binding domain that binds TRGDC comprises: a VH comprising a VH CDR1, a VH CDR2, and a VH CDR3 having an amino acid sequence of a VH CDR1, a VH CDR2, and a VH CDR3, respectively, of a VH having an amino acid sequence of SEQ ID NO:4417. In one embodiment, the first binding domain that binds TRGDC comprises: a VL comprising a VL CDR1, a VL CDR2, and a VL CDR3 having an amino acid sequence of a VL CDR1, a VL CDR2, and a VL CDR3, respectively, of a VL having an amino acid sequence of SEQ ID NO:4418. In one embodiment, the first binding domain that binds TRGDC comprises: a VH comprising a VH CDR1, a VH CDR2, and a VH CDR3 having an amino acid sequence of a VH CDR1, a VH CDR2, and a VH CDR3, respectively, of a VH having an amino acid sequence of SEQ ID NO:4417; and a VL comprising a VL CDR1, a VL CDR2, and a VL CDR3 having an amino acid sequence of a VL CDR1, a VL CDR2, and a VL CDR3, respectively, of a VL having an amino acid sequence of SEQ ID NO:4418. In one embodiment, the first binding domain that binds TRGDC comprises: a VH comprising a VH CDR1, a VH CDR2, and a VH CDR3 having an amino acid sequence of a VH CDR1, a VH CDR2, and a VH CDR3, respectively, of a VH having an amino acid sequence of SEQ ID NO:4451. In one embodiment, the first binding domain that binds TRGDC comprises: a VL comprising a VL CDR1, a VL CDR2, and a VL CDR3 having an amino acid sequence of a VL CDR1, a VL CDR2, and a VL CDR3, respectively, of a VL having an amino acid sequence of SEQ ID NO:4452. In one embodiment, the first binding domain that binds TRGDC comprises: a VH comprising a VH CDR1, a VH CDR2, and a VH CDR3 having an amino acid sequence of a VH CDR1, a VH CDR2, and a VH CDR3, respectively, of a VH having an amino acid sequence of SEQ ID NO:4451; and a VL comprising a VL CDR1, a VL CDR2, and a VL CDR3 having an amino acid sequence of a VL CDR1, a VL CDR2, and a VL CDR3, respectively, of a VL having an amino acid sequence of SEQ ID NO:4452. In one embodiment, the first binding domain that binds TRGDC comprises: a VH comprising a VH CDR1, a VH CDR2, and a VH CDR3 having an amino acid sequence of a VH CDR1, a VH CDR2, and a VH CDR3, respectively, of a VH having an amino acid sequence of SEQ ID NO:4485. In one embodiment, the first binding domain that binds TRGDC comprises: a VL comprising a VL CDR1, a VL CDR2, and a VL CDR3 having an amino acid sequence of a VL CDR1, a VL CDR2, and a VL CDR3, respectively, of a VL having an amino acid sequence of SEQ ID NO:4486. In one embodiment, the first binding domain that binds TRGDC comprises: a VH comprising a VH CDR1, a VH CDR2, and a VH CDR3 having an amino acid sequence of a VH CDR1, a VH CDR2, and a VH CDR3, respectively, of a VH having an amino acid sequence of SEQ ID NO:4485; and a VL comprising a VL CDR1, a VL CDR2, and a VL CDR3 having an amino acid sequence of a VL CDR1, a VL CDR2, and a VL CDR3, respectively, of a VL having an amino acid sequence of SEQ ID NO:4486. In one embodiment, the first binding domain that binds TRGDC comprises: a VH comprising a VH CDR1, a VH CDR2, and a VH CDR3 having an amino acid sequence of a VH CDR1, a VH CDR2, and a VH CDR3, respectively, of a VH having an amino acid sequence of SEQ ID NO:4519. In one embodiment, the first binding domain that binds TRGDC comprises: a VL comprising a VL CDR1, a VL CDR2, and a VL CDR3 having an amino acid sequence of a VL CDR1, a VL CDR2, and a VL CDR3, respectively, of a VL having an amino acid sequence of SEQ ID NO:4520. In one embodiment, the first binding domain that binds TRGDC comprises: a VH comprising a VH CDR1, a VH CDR2, and a VH CDR3 having an amino acid sequence of a VH CDR1, a VH CDR2, and a VH CDR3, respectively, of a VH having an amino acid sequence of SEQ ID NO:4519; and a VL comprising a VL CDR1, a VL CDR2, and a VL CDR3 having an amino acid sequence of a VL CDR1, a VL CDR2, and a VL CDR3, respectively, of a VL having an amino acid sequence of SEQ ID NO:4520. In one embodiment, the first binding domain that binds TRGDC comprises: a VH comprising a VH CDR1, a VH CDR2, and a VH CDR3 having an amino acid sequence of a VH CDR1, a VH CDR2, and a VH CDR3, respectively, of a VH having an amino acid sequence of SEQ ID NO:4553. In one embodiment, the first binding domain that binds TRGDC comprises: a VL comprising a VL CDR1, a VL CDR2, and a VL CDR3 having an amino acid sequence of a VL CDR1, a VL CDR2, and a VL CDR3, respectively, of a VL having an amino acid sequence of SEQ ID NO:4554. In one embodiment, the first binding domain that binds TRGDC comprises: a VH comprising a VH CDR1, a VH CDR2, and a VH CDR3 having an amino acid sequence of a VH CDR1, a VH CDR2, and a VH CDR3, respectively, of a VH having an amino acid sequence of SEQ ID NO:4553; and a VL comprising a VL CDR1, a VL CDR2, and a VL CDR3 having an amino acid sequence of a VL CDR1, a VL CDR2, and a VL CDR3, respectively, of a VL having an amino acid sequence of SEQ ID NO:4554. In one embodiment, the first binding domain that binds TRGDC comprises: a VH comprising a VH CDR1, a VH CDR2, and a VH CDR3 having an amino acid sequence of a VH CDR1, a VH CDR2, and a VH CDR3, respectively, of a VH having an amino acid sequence of SEQ ID NO:4587. In one embodiment, the first binding domain that binds TRGDC comprises: a VL comprising a VL CDR1, a VL CDR2, and a VL CDR3 having an amino acid sequence of a VL CDR1, a VL CDR2, and a VL CDR3, respectively, of a VL having an amino acid sequence of SEQ ID NO:4588. In one embodiment, the first binding domain that binds TRGDC comprises: a VH comprising a VH CDR1, a VH CDR2, and a VH CDR3 having an amino acid sequence of a VH CDR1, a VH CDR2, and a VH CDR3, respectively, of a VH having an amino acid sequence of SEQ ID NO:4587; and a VL comprising a VL CDR1, a VL CDR2, and a VL CDR3 having an amino acid sequence of a VL CDR1, a VL CDR2, and a VL CDR3, respectively, of a VL having an amino acid sequence of SEQ ID NO:4588. In one embodiment, the first binding domain that binds TRGDC comprises: a VH comprising a VH CDR1, a VH CDR2, and a VH CDR3 having an amino acid sequence of a VH CDR1, a VH CDR2, and a VH CDR3, respectively, of a VH having an amino acid sequence of SEQ ID NO:4621. In one embodiment, the first binding domain that binds TRGDC comprises: a VL comprising a VL CDR1, a VL CDR2, and a VL CDR3 having an amino acid sequence of a VL CDR1, a VL CDR2, and a VL CDR3, respectively, of a VL having an amino acid sequence of SEQ ID NO:4622. In one embodiment, the first binding domain that binds TRGDC comprises: a VH comprising a VH CDR1, a VH CDR2, and a VH CDR3 having an amino acid sequence of a VH CDR1, a VH CDR2, and a VH CDR3, respectively, of a VH having an amino acid sequence of SEQ ID NO:4621; and a VL comprising a VL CDR1, a VL CDR2, and a VL CDR3 having an amino acid sequence of a VL CDR1, a VL CDR2, and a VL CDR3, respectively, of a VL having an amino acid sequence of SEQ ID NO:4622. In one embodiment, the first binding domain that binds TRGDC comprises: a VH comprising a VH CDR1, a VH CDR2, and a VH CDR3 having an amino acid sequence of a VH CDR1, a VH CDR2, and a VH CDR3, respectively, of a VH having an amino acid sequence of SEQ ID NO:4655. In one embodiment, the first binding domain that binds TRGDC comprises: a VL comprising a VL CDR1, a VL CDR2, and a VL CDR3 having an amino acid sequence of a VL CDR1, a VL CDR2, and a VL CDR3, respectively, of a VL having an amino acid sequence of SEQ ID NO:4656. In one embodiment, the first binding domain that binds TRGDC comprises: a VH comprising a VH CDR1, a VH CDR2, and a VH CDR3 having an amino acid sequence of a VH CDR1, a VH CDR2, and a VH CDR3, respectively, of a VH having an amino acid sequence of SEQ ID NO:4655; and a VL comprising a VL CDR1, a VL CDR2, and a VL CDR3 having an amino acid sequence of a VL CDR1, a VL CDR2, and a VL CDR3, respectively, of a VL having an amino acid sequence of SEQ ID NO:4656.

[0265] In some embodiments, a multispecific antibody provided herein is a diabody, a cross-body, or a multispecific antibody obtained via a controlled Fab arm exchange as those described herein.

[0266] In some embodiments, the multispecific antibodies include IgG-like molecules with complementary CH3 domains that promote heterodimerization; recombinant IgG-like dual targeting molecules, wherein the two sides of the molecule each contain the Fab fragment or part of the Fab fragment of at least two different antibodies; IgG fusion molecules, wherein full length IgG antibodies are fused to an extra Fab fragment or parts of Fab fragment; Fc fusion molecules, wherein single chain Fv molecules or stabilized diabodies are fused to heavy-chain constant-domains, Fc-regions or parts thereof; Fab fusion molecules, wherein different Fab-fragments are fused together; ScFv- and diabody-based and heavy chain antibodies (e.g., domain antibodies, nanobodies) wherein different single chain Fv molecules or different diabodies or different heavy-chain antibodies (e.g. domain antibodies, nanobodies) are fused to each other or to another protein or carrier molecule.

[0267] In some embodiments, IgG-like molecules with complementary CH3 domains molecules include the Triomab/Quadroma (Trion Pharma/Fresenius Biotech), the Knobs-into-Holes (Genentech), CrossMAbs (Roche) and the electrostatically-matched (Amgen), the LUZ-Y (Genentech), the Strand Exchange Engineered Domain body (SEEDbody) (EMD Serono), the Biclonic (Merus) and the DuoBody (Genmab A/S).

[0268] In some embodiments, recombinant IgG-like dual targeting molecules include Dual Targeting (DT)-Ig (GSK/Domantis), Two-in-one Antibody (Genentech), Cross-linked Mabs (Karmanos Cancer Center), mAb2 (F-Star) and CovX-body (CovX/Pfizer).

[0269] In some embodiments, IgG fusion molecules include Dual Variable Domain (DVD)-Ig (Abbott), IgG-like Bispecific (ImClone/Eli Lilly), Ts2Ab (Medlmmune/AZ) and BsAb (Zymogenetics), HERCULES (Biogen Idec) and TvAb (Roche).

[0270] In some embodiments, Fc fusion molecules can include ScFv/Fc Fusions (Academic Institution), SCORPION (Emergent BioSolutions/Trubion, Zymogenetics/BMS), Dual Affinity Retargeting Technology (Fc-DART) (MacroGenics) and Dual(ScFv)₂-Fab (National Research Center for Antibody Medicine—China).

[0271] In some embodiments, Fab fusion bispecific antibodies include F(ab)₂ (Medarex/AMGEN), Dual-Action or Bis-Fab (Genentech), Dock-and-Lock (DNL) (ImmunoMedics), Bivalent Bispecific (Biotecnol) and Fab-Fv (UCB-Celltech). ScFv-, diabody-based, and domain antibodies, include but are not limited to, Bispecific T Cell Engager (BiTE) (Micromet), Tandem Diabody (Tandab) (Affimed), Dual Affinity Retargeting Technology (DART) (MacroGenics), Single-chain Diabody (Academic), TCR-like Antibodies (AIT, ReceptorLogics), Human Serum Albumin ScFv Fusion (Merrimack) and COMBODY (Epigen Biotech), dual targeting nanobodies (Ablynx), dual targeting heavy chain only domain antibodies.

[0272] Full length bispecific antibodies provided herein can be generated for example using Fab arm exchange (or half molecule exchange) between two mono specific bivalent antibodies by introducing substitutions at the heavy chain CH3 interface in each half molecule to favor heterodimer formation of two antibody half molecules having distinct specificity either in vitro in cell-free environment or using co-expression. The Fab arm exchange reaction is the result of a disulfide-bond isomerization reaction and dissociation-association of CH3 domains. The heavy-chain disulfide bonds in the hinge regions of the parent mono specific antibodies are reduced. The resulting free cysteines of one of the parent monospecific antibodies form an inter heavy-chain disulfide bond with cysteine residues of a second parent mono specific antibody molecule and simultaneously CH3 domains of the parent antibodies release and reform by dissociation-association. The CH3 domains of the Fab arms can be engineered to favor heterodimerization over homodimerization. The resulting product is a bispecific antibody having two Fab arms or half molecules which each binding a distinct epitope, e.g., an epitope on CD8 and an epitope on CD4. Other methods of making multispecific antibodies are known and contemplated.

[0273] “Homodimerization” as used herein refers to an interaction of two heavy chains having identical CH3 amino acid sequences. “Homodimer” as used herein refers to an antibody having two heavy chains with identical CH3 amino acid sequences.

[0274] “Heterodimerization” as used herein refers to an interaction of two heavy chains having non-identical CH3 amino acid sequences. “Heterodimer” as used herein refers to an antibody having two heavy chains with non-identical CH3 amino acid sequences.

[0275] The “knob-in-hole” strategy (see, e.g., PCT Publ. No. WO2006/028936) can be used to generate full length bispecific antibodies. Briefly, selected amino acids forming the interface of the CH3 domains in human IgG can be mutated at positions affecting CH3 domain interactions to promote heterodimer formation. An amino acid with a small side chain (hole) is introduced into a heavy chain of an antibody specifically binding a first antigen and an amino acid with a large side chain (knob) is introduced into a heavy chain of an antibody specifically binding a second antigen. After co-expression of the two antibodies, a heterodimer is formed as a result of the preferential interaction of the heavy chain with a “hole” with the heavy chain with a “knob.” Exemplary CH3 substitution pairs forming a knob and a hole are (expressed as modified position in the first CH3 domain of the first heavy chain/modified position in the second CH3 domain of the second heavy chain): T366Y/F405A, T366W/F405W, F405W/Y407A, T394W/Y407T, T394S/Y407A, T366W/T394S, F405W/T394S and T366W/T366S_L368A_Y407V.

[0276] Other strategies such as promoting heavy chain heterodimerization using electrostatic interactions by substituting positively charged residues at one CH3 surface and negatively charged residues at a second CH3 surface can be used, as described in US Pat. Publ. No. US2010/0015133; US Pat. Publ. No. US2009/0182127; US Pat. Publ. No. US2010/028637; or US Pat. Publ. No. US2011/0123532. In other strategies, heterodimerization can be promoted by the following substitutions (expressed as modified position in the first CH3 domain of the first heavy chain/modified position in the second CH3 domain of the second heavy chain): L351Y_F405AY407V/T394W, T3661_K392M_T394W/F405A_Y407V, T366L_K392M_T394W/F405A_Y407V, L351Y_Y407A/T366A_K409F, L351Y_Y407A/T366V K409F Y407A/T366A_K409F, or T350V_L351Y_F405A Y407V/T350V_T366L_K392L_T394W as described in U.S. Pat. Publ. No. US2012/0149876 or U.S. Pat. Publ. No. US2013/0195849.

[0277] In addition to methods described above, bispecific antibodies provided herein can be generated in vitro in a cell-free environment by introducing asymmetrical mutations in the CH3 regions of two mono specific homodimeric antibodies and forming the bispecific heterodimeric antibody from two parent monospecific homodimeric antibodies in reducing conditions to allow disulfide bond isomerization according to methods described in PCT Pat. Publ. No. WO2011/131746. In the methods, the first monospecific bivalent antibody and the second monospecific bivalent antibody are engineered to have certain substitutions at the CH3 domain that promotes heterodimer stability; the antibodies are incubated together under reducing conditions sufficient to allow the cysteines in the hinge region to undergo disulfide bond isomerization; thereby generating the bispecific antibody by Fab arm exchange. The incubation conditions can optionally be restored to non-reducing conditions. Exemplary reducing agents that can be used are 2-mercaptoethylamine (2-MEA), dithiothreitol (DTT), dithioerythritol (DTE), glutathione, tris (2-carboxyethyl) phosphine (TCEP), L-cysteine and beta-mercaptoethanol, preferably a reducing agent selected from the group consisting of: 2-mercaptoethylamine, dithiothreitol and tris (2-carboxyethyl) phosphine. For example, incubation for at least 90 min at a temperature of at least 20° C. in the presence of at least 25 mM 2-MEA or in the presence of at least 0.5 mM dithiothreitol at a pH from 5-8, for example at pH of 7.0 or at pH of 7.4 can be used.

[0278] In some embodiments, the TRGV9 antibody comprises a single chain antibody. In some embodiments, the TRGV9 antibody comprises a single domain antibody. In certain embodiments, the TRGV9 antibody comprises a nanobody. In certain embodiments, the TRGV9 antibody comprises a VHH antibody. In certain embodiments, the TRGV9 antibody comprises a llama antibody. In some embodiments, the TRGV9 antibody does not comprise a single chain antibody. In some embodiments, the TRGV9 antibody does not comprise a single domain antibody. In certain embodiments, the TRGV9 antibody does not comprise a nanobody. In certain embodiments, the TRGV9 antibody does not comprise a VHH antibody. In certain embodiments, the TRGV9 antibody does not comprise a llama antibody.

[0279] In some embodiments, the TRGV9 multispecific antibody comprises a single chain antibody. In some embodiments, the TRGV9 multispecific antibody comprises a single domain antibody. In certain embodiments, the TRGV9 multispecific antibody comprises a nanobody. In certain embodiments, the TRGV9 multispecific antibody comprises a VHH antibody. In certain embodiments, the TRGV9 multispecific antibody comprises a llama antibody. In some embodiments, the TRGV9 multispecific antibody does not comprise a single chain antibody. In some embodiments, the TRGV9 multispecific antibody does not comprise a single domain antibody. In certain embodiments, the TRGV9 multispecific antibody does not comprise a nanobody. In certain embodiments, the TRGV9 multispecific antibody does not comprise a VHH antibody. In certain embodiments, the TRGV9 multispecific antibody does not comprise a llama antibody.

[0280] According to another particular aspect, provided herein is a TRGV9 antibody or antigen-binding fragment thereof that induces antibody-dependent cell-mediated cytotoxicity (ADCC). The antibody or antigen-binding fragment thereof can, for example, induce ADCC in vitro.

[0281] In certain embodiments, the antibody or antigen-binding fragment thereof induces T cell dependent cytotoxicity of a second cell in vitro with an EC₅₀ of less than about 160 pM, when assessed in vitro at an effector to target cell ratio of 1:1.

[0282] In some embodiments, TRGV9 is present on the surface of a T cell. In some embodiments, the TRGV9 is present on the surface of a T cell, and the second target antigen is on the surface of a second cell. In some embodiments, the second cell is killed when the multispecific antibody binds to the TRGV9 on the surface of the T cell and the second target antigen on the surface of the second cell.

[0283] In some embodiments, the TRDV2 antibody comprises a single chain antibody. In some embodiments, the TRDV2 antibody comprises a single domain antibody. In certain embodiments, the TRDV2 antibody comprises a nanobody. In certain embodiments, the TRDV2 antibody comprises a VHH antibody. In certain embodiments, the TRDV2 antibody comprises a llama antibody. In some embodiments, the TRDV2 antibody does not comprise a single chain antibody. In some embodiments, the TRDV2 antibody does not comprise a single domain antibody. In certain embodiments, the TRDV2 antibody does not comprise a nanobody. In certain embodiments, the TRDV2 antibody does not comprise a VHH antibody. In certain embodiments, the TRDV2 antibody does not comprise a llama antibody.

[0284] In some embodiments, the TRDV2 multispecific antibody comprises a single chain antibody. In some embodiments, the TRDV2 multispecific antibody comprises a single domain antibody. In certain embodiments, the TRDV2 multispecific antibody comprises a nanobody. In certain embodiments, the TRDV2 multispecific antibody comprises a VHH antibody. In certain embodiments, the TRDV2 multispecific antibody comprises a llama antibody. In some embodiments, the TRDV2 multispecific antibody does not comprise a single chain antibody. In some embodiments, the TRDV2 multispecific antibody does not comprise a single domain antibody. In certain embodiments, the TRDV2 multispecific antibody does not comprise a nanobody. In certain embodiments, the TRDV2 multispecific antibody does not comprise a VHH antibody. In certain embodiments, the TRDV2 multispecific antibody does not comprise a llama antibody.

[0285] According to another particular aspect, provided herein is a TRDV2 antibody or antigen-binding fragment thereof that induces antibody-dependent cell-mediated cytotoxicity (ADCC). The antibody or antigen-binding fragment thereof can, for example, induce ADCC in vitro.

[0286] In certain embodiments, the antibody or antigen-binding fragment thereof induces T cell dependent cytotoxicity of a second cell in vitro with an EC₅₀ of less than about 160 pM, when assessed in vitro at an effector to target cell ratio of 1:1.

[0287] In some embodiments, TRDV2 is present on the surface of a T cell. In some embodiments, the TRDV2 is present on the surface of a T cell, and the second target antigen is on the surface of a second cell. In some embodiments, the second cell is killed when the multispecific antibody binds to the TRDV2 on the surface of the T cell and the second target antigen on the surface of the second cell.

[0288] In some embodiments, the TRGDC antibody comprises a single chain antibody. In some embodiments, the TRGDC antibody comprises a single domain antibody. In certain embodiments, the TRGDC antibody comprises a nanobody. In certain embodiments, the TRGDC antibody comprises a VHH antibody. In certain embodiments, the TRGDC antibody comprises a llama antibody. In some embodiments, the TRGDC antibody does not comprise a single chain antibody. In some embodiments, the TRGDC antibody does not comprise a single domain antibody. In certain embodiments, the TRGDC antibody does not comprise a nanobody. In certain embodiments, the TRGDC antibody does not comprise a VHH antibody. In certain embodiments, the TRGDC antibody does not comprise a llama antibody.

[0289] In some embodiments, the TRGDC multispecific antibody comprises a single chain antibody. In some embodiments, the TRGDC multispecific antibody comprises a single domain antibody. In certain embodiments, the TRGDC multispecific antibody comprises a nanobody. In certain embodiments, the TRGDC multispecific antibody comprises a VHH antibody. In certain embodiments, the TRGDC multispecific antibody comprises a llama antibody. In some embodiments, the TRGDC multispecific antibody does not comprise a single chain antibody. In some embodiments, the TRGDC multispecific antibody does not comprise a single domain antibody. In certain embodiments, the TRGDC multispecific antibody does not comprise a nanobody. In certain embodiments, the TRGDC multispecific antibody does not comprise a VHH antibody. In certain embodiments, the TRGDC multispecific antibody does not comprise a llama antibody.

[0290] According to another particular aspect, provided herein is a TRGDC antibody or antigen-binding fragment thereof that induces antibody-dependent cell-mediated cytotoxicity (ADCC). The antibody or antigen-binding fragment thereof can, for example, induce ADCC in vitro.

[0291] In certain embodiments, the antibody or antigen-binding fragment thereof induces T cell dependent cytotoxicity of a second cell in vitro with an EC₅₀ of less than about 160 pM, when assessed in vitro at an effector to target cell ratio of 1:1.

[0292] In some embodiments, TRGDC is present on the surface of a T cell. In some embodiments, the TRGDC is present on the surface of a T cell, and the second target antigen is on the surface of a second cell. In some embodiments, the second cell is killed when the multispecific antibody binds to the TRGDC on the surface of the T cell and the second target antigen on the surface of the second cell.

[0293] In some embodiments, the multispecific antibody induces T cell dependent cytotoxicity of the second cell in vitro with an EC₅₀ of less than about 500 pM. In some embodiments, the multispecific antibody induces T cell dependent cytotoxicity of the second cell in vitro with an EC₅₀ of less than about 300 pM. In some embodiments, the multispecific antibody induces γδ T cell dependent cytotoxicity of the second cell in vitro with an EC₅₀ of less than about 160 pM. In some embodiments, the EC₅₀ is assessed with a mixture of γδ T effector cells and target cells expressing the second target antigen. In some embodiments, the effector cell to target cell ratio is about 0.01 to 1 to about 5 to 1. In some embodiments, the effector cell to target cell ratio is about 0.1 to 1 to about 2 to 1. In some embodiments, the effector cell to target cell ratio is about 1:1.

[0294] In certain embodiments, the EC₅₀ is less than about 1000 pM, less than about 900 pM, less than about 800 pM, less than about 700 pM, less than about 600 pM, less than about 500 pM, less than about 400 pM, less than about 300 pM, less than about 200 pM, less than about 190 pM, less than about 180 pM, less than about 170 pM, less than about 160 pM, less than about 150 pM, less than about 140 pM, less than about 130 pM, less than about 120 pM, less than about 110 pM, less than about 100 pM, less than about 90 pM, less than about 80 pM, less than about 70 pM, less than about 60 pM, less than about 50 pM, less than about 40 pM, less than about 30 pM, less than about 20 pM, or less than about 10 pM.

[0295] In certain embodiments, the effector to target cell ratio can, for example, be 0.01:1, 0.02:1, 0.03:1, 0.04:1, 0.05:1, 0.06:1, 0.07:1, 0.08:1, 0.09:1, 1:1, 2:1, 3:1, 4:1, 5:1, 6:1, 7:1, 8:1, 9:1, or 10:1. In certain embodiments, the effector to target cell ratio can, for example, be between 0.01:1 and 10:1. In certain embodiments, the concentration of the multispecific antibody or antigen-binding fragment thereof is about 0.000005 ng/mL, about 0.00005 ng/mL, about 0.0005, about 0.005 ng/mL, about 0.01 ng/mL, about 0.02 ng/mL, about 0.03 ng/mL, about 0.04 ng/mL, about 0.05 ng/mL, about 0.06 ng/mL, about 0.07 ng/mL, about 0.08 ng/mL, about 0.09 ng/mL, about 0.1 ng/mL, about 0.5 ng/mL, about 1.0 ng/mL, about 10 ng/mL, about 20 ng/mL about, about 30 ng/mL about 40 ng/mL, about 50 ng/mL, about 60 ng/mL, about 70 ng/mL, about 80 ng/mL, about 90 ng/mL, about 100 ng/mL, or about 1000 ng/mL. In certain embodiments, the concentration of the multispecific antibody or antigen-binding fragment thereof is between about 0.000005 ng/mL and about 1000 ng/mL.

[0296] In another aspect, provided herein is an antibody that competes for binding to TRGV9 with any of the TRGV9 antibodies described herein. In another aspect, provided herein is an antibody that binds to the same epitope as any of the TRGV9 antibodies described herein. In another aspect, provided is a TRGV9 antibody that binds an epitope on TRGV9 that overlaps with the epitope on TRGV9 bound by a TRGV9 antibody described herein. In some embodiments, the TRGV9 antibody comprises a VH CDR1, VH CDR2, and VH CDR3 of a TRGV9 antibody provided herein. In some embodiments, the TRGV9 antibody comprises a VL CDR1, VL CDR2, and VL CDR3 of a TRGV9 antibody provided herein. In some embodiments, the TRGV9 antibody comprises a VH CDR1, VH CDR2, VH CDR3, a VL CDR1, VL CDR2, and VL CDR3 of a TRGV9 antibody provided herein. In some embodiments, the TRGV9 antibody comprises a VH of a TRGV9 antibody provided herein. In some embodiments, the TRGV9 antibody comprises a VL of a TRGV9 antibody provided herein. In some embodiments, the TRGV9 antibody comprises a VH and a VL of a TRGV9 antibody provided herein. In some embodiments, the TRGV9 antibody comprises a VH CDR1, VH CDR2, VH CDR3, a VL CDR1, VL CDR2, and VL CDR3 of a TRGV9 antibody provided herein. In some embodiments, the VH CDR1, VH CDR2, VH CDR3, VL CDR1, VL CDR2, and VL CDR3 amino acid sequences of the TRGV9 antibody are according to the Kabat numbering system. In some embodiments, the VH CDR1, VH CDR2, VH CDR3, VL CDR1, VL CDR2, and VL CDR3 amino acid sequences of the TRGV9 antibody are according to the Chothia numbering system. In some embodiments, the VH CDR1, VH CDR2, VH CDR3, VL CDR1, VL CDR2, and VL CDR3 amino acid sequences of the TRGV9 antibody are according to the AbM numbering system. In some embodiments, the VH CDR1, VH CDR2, VH CDR3, VL CDR1, VL CDR2, and VL CDR3 amino acid sequences of the TRGV9 antibody are according to the Contact numbering system. In some embodiments, the VH CDR1, VH CDR2, VH CDR3, VL CDR1, VL CDR2, and VL CDR3 amino acid sequences of the TRGV9 antibody are according to the IMGT numbering system. In certain embodiments, the TRGV9 antibody is a multispecific antibody. In some embodiments, the TRGV9 antibody is a bispecific antibody.

[0297] In another aspect, provided is an antibody that competes for binding to TRGV9 with a TRGV9 reference antibody. In another aspect, provided is a TRGV9 antibody that binds to the same TRGV9 epitope as a TRGV9 reference antibody. In another aspect, provided is a TRGV9 antibody that binds an epitope on TRGV9 that overlaps with the epitope on TRGV9 bound by a TRGV9 reference antibody. In some embodiments, the TRGV9 reference antibody comprises a VH CDR1, VH CDR2, and VH CDR3 of a TRGV9 reference antibody provided herein. In some embodiments, the TRGV9 reference antibody comprises a VL CDR1, VL CDR2, and VL CDR3 of a TRGV9 reference antibody provided herein. In some embodiments, the TRGV9 reference antibody comprises a VH CDR1, VH CDR2, VH CDR3, a VL CDR1, VL CDR2, and VL CDR3 of a TRGV9 reference antibody provided herein. In some embodiments, the TRGV9 reference antibody comprises a VH of a TRGV9 reference antibody provided herein. In some embodiments, the TRGV9 reference antibody comprises a VL of a TRGV9 reference antibody provided herein. In some embodiments, the TRGV9 reference antibody comprises a VH and a VL of a TRGV9 reference antibody provided herein. In some embodiments, the TRGV9 reference antibody comprises a VH CDR1, VH CDR2, VH CDR3, a VL CDR1, VL CDR2, and VL CDR3 of a TRGV9 reference antibody provided herein. In some embodiments, the VH CDR1, VH CDR2, VH CDR3, VL CDR1, VL CDR2, and VL CDR3 amino acid sequences of the TRGV9 reference antibody are according to the Kabat numbering system. In some embodiments, the VH CDR1, VH CDR2, VH CDR3, VL CDR1, VL CDR2, and VL CDR3 amino acid sequences of the TRGV9 reference antibody are according to the Chothia numbering system. In some embodiments, the VH CDR1, VH CDR2, VH CDR3, VL CDR1, VL CDR2, and VL CDR3 amino acid sequences of the TRGV9 reference antibody are according to the AbM numbering system. In some embodiments, the VH CDR1, VH CDR2, VH CDR3, VL CDR1, VL CDR2, and VL CDR3 amino acid sequences of the TRGV9 reference antibody are according to the Contact numbering system. In some embodiments, the VH CDR1, VH CDR2, VH CDR3, VL CDR1, VL CDR2, and VL CDR3 amino acid sequences of the TRGV9 reference antibody are according to the IMGT numbering system. In certain embodiments, the antibody is a multispecific antibody. In some embodiments, the antibody is a bispecific antibody. In certain embodiments, the TRGV9 reference antibody is a multispecific antibody. In some embodiments, the TRGV9 reference antibody is a bispecific antibody.

[0298] In another aspect, provided herein is an antibody that competes for binding to TRDV2 with any of the TRDV2 antibodies described herein. In another aspect, provided herein is an antibody that binds to the same epitope as any of the TRDV2 antibodies described herein. In another aspect, provided is a TRDV2 antibody that binds an epitope on TRDV2 that overlaps with the epitope on TRDV2 bound by a TRDV2 antibody described herein. In some embodiments, the TRDV2 antibody comprises a VH CDR1, VH CDR2, and VH CDR3 of a TRDV2 antibody provided herein. In some embodiments, the TRDV2 antibody comprises a VL CDR1, VL CDR2, and VL CDR3 of a TRDV2 antibody provided herein. In some embodiments, the TRDV2 antibody comprises a VH CDR1, VH CDR2, VH CDR3, a VL CDR1, VL CDR2, and VL CDR3 of a TRDV2 antibody provided herein. In some embodiments, the TRDV2 antibody comprises a VH of a TRDV2 antibody provided herein. In some embodiments, the TRDV2 antibody comprises a VL of a TRDV2 antibody provided herein. In some embodiments, the TRDV2 antibody comprises a VH and a VL of a TRDV2 antibody provided herein. In some embodiments, the TRDV2 antibody comprises a VH CDR1, VH CDR2, VH CDR3, a VL CDR1, VL CDR2, and VL CDR3 of a TRDV2 antibody provided herein. In some embodiments, the VH CDR1, VH CDR2, VH CDR3, VL CDR1, VL CDR2, and VL CDR3 amino acid sequences of the TRDV2 antibody are according to the Kabat numbering system. In some embodiments, the VH CDR1, VH CDR2, VH CDR3, VL CDR1, VL CDR2, and VL CDR3 amino acid sequences of the TRDV2 antibody are according to the Chothia numbering system. In some embodiments, the VH CDR1, VH CDR2, VH CDR3, VL CDR1, VL CDR2, and VL CDR3 amino acid sequences of the TRDV2 antibody are according to the AbM numbering system. In some embodiments, the VH CDR1, VH CDR2, VH CDR3, VL CDR1, VL CDR2, and VL CDR3 amino acid sequences of the TRDV2 antibody are according to the Contact numbering system. In some embodiments, the VH CDR1, VH CDR2, VH CDR3, VL CDR1, VL CDR2, and VL CDR3 amino acid sequences of the TRDV2 antibody are according to the IMGT numbering system. In certain embodiments, the TRDV2 antibody is a multispecific antibody. In some embodiments, the TRDV2 antibody is a bispecific antibody.

[0299] In another aspect, provided is an antibody that competes for binding to TRDV2 with a TRDV2 reference antibody. In another aspect, provided is a TRDV2 antibody that binds to the same TRDV2 epitope as a TRDV2 reference antibody. In another aspect, provided is a TRDV2 antibody that binds an epitope on TRDV2 that overlaps with the epitope on TRDV2 bound by a TRDV2 reference antibody. In some embodiments, the TRDV2 reference antibody comprises a VH CDR1, VH CDR2, and VH CDR3 of a TRDV2 reference antibody provided herein. In some embodiments, the TRDV2 reference antibody comprises a VL CDR1, VL CDR2, and VL CDR3 of a TRDV2 reference antibody provided herein. In some embodiments, the TRDV2 reference antibody comprises a VH CDR1, VH CDR2, VH CDR3, a VL CDR1, VL CDR2, and VL CDR3 of a TRDV2 reference antibody provided herein. In some embodiments, the TRDV2 reference antibody comprises a VH of a TRDV2 reference antibody provided herein. In some embodiments, the TRDV2 reference antibody comprises a VL of a TRDV2 reference antibody provided herein. In some embodiments, the TRDV2 reference antibody comprises a VH and a VL of a TRDV2 reference antibody provided herein. In some embodiments, the TRDV2 reference antibody comprises a VH CDR1, VH CDR2, VH CDR3, a VL CDR1, VL CDR2, and VL CDR3 of a TRDV2 reference antibody provided herein. In some embodiments, the VH CDR1, VH CDR2, VH CDR3, VL CDR1, VL CDR2, and VL CDR3 amino acid sequences of the TRDV2 reference antibody are according to the Kabat numbering system. In some embodiments, the VH CDR1, VH CDR2, VH CDR3, VL CDR1, VL CDR2, and VL CDR3 amino acid sequences of the TRDV2 reference antibody are according to the Chothia numbering system. In some embodiments, the VH CDR1, VH CDR2, VH CDR3, VL CDR1, VL CDR2, and VL CDR3 amino acid sequences of the TRDV2 reference antibody are according to the AbM numbering system. In some embodiments, the VH CDR1, VH CDR2, VH CDR3, VL CDR1, VL CDR2, and VL CDR3 amino acid sequences of the TRDV2 reference antibody are according to the Contact numbering system. In some embodiments, the VH CDR1, VH CDR2, VH CDR3, VL CDR1, VL CDR2, and VL CDR3 amino acid sequences of the TRDV2 reference antibody are according to the IMGT numbering system. In certain embodiments, the antibody is a multispecific antibody. In some embodiments, the antibody is a bispecific antibody. In certain embodiments, the TRDV2 reference antibody is a multispecific antibody. In some embodiments, the TRDV2 reference antibody is a bispecific antibody.

[0300] In another aspect, provided herein is an antibody that competes for binding to TRGDC with any of the TRGDC antibodies described herein. In another aspect, provided herein is an antibody that binds to the same epitope as any of the TRGDC antibodies described herein. In another aspect, provided is a TRGDC antibody that binds an epitope on TRGDC that overlaps with the epitope on TRGDC bound by a TRGDC antibody described herein. In some embodiments, the TRGDC antibody comprises a VH CDR1, VH CDR2, and VH CDR3 of a TRGDC antibody provided herein. In some embodiments, the TRGDC antibody comprises a VL CDR1, VL CDR2, and VL CDR3 of a TRGDC antibody provided herein. In some embodiments, the TRGDC antibody comprises a VH CDR1, VH CDR2, VH CDR3, a VL CDR1, VL CDR2, and VL CDR3 of a TRGDC antibody provided herein. In some embodiments, the TRGDC antibody comprises a VH of a TRGDC antibody provided herein. In some embodiments, the TRGDC antibody comprises a VL of a TRGDC antibody provided herein. In some embodiments, the TRGDC antibody comprises a VH and a VL of a TRGDC antibody provided herein. In some embodiments, the TRGDC antibody comprises a VH CDR1, VH CDR2, VH CDR3, a VL CDR1, VL CDR2, and VL CDR3 of a TRGDC 30 antibody provided herein. In some embodiments, the VH CDR1, VH CDR2, VH CDR3, VL CDR1, VL CDR2, and VL CDR3 amino acid sequences of the TRGDC antibody are according to the Kabat numbering system. In some embodiments, the VH CDR1, VH CDR2, VH CDR3, VL CDR1, VL CDR2, and VL CDR3 amino acid sequences of the TRGDC antibody are according to the Chothia numbering system. In some embodiments, the VH CDR1, VH CDR2, VH CDR3, VL CDR1, VL CDR2, and VL CDR3 amino acid sequences of the TRGDC antibody are according to the AbM numbering system. In some embodiments, the VH CDR1, VH CDR2, VH CDR3, VL CDR1, VL CDR2, and VL CDR3 amino acid sequences of the TRGDC antibody are according to the Contact numbering system. In some embodiments, the VH CDR1, VH CDR2, VH CDR3, VL CDR1, VL CDR2, and VL CDR3 amino acid sequences of the TRGDC antibody are according to the IMGT numbering system. In certain embodiments, the TRGDC antibody is a multispecific antibody. In some embodiments, the TRGDC antibody is a bispecific antibody.

[0301] In another aspect, provided is an antibody that competes for binding to TRGDC with a TRGDC reference antibody. In another aspect, provided is a TRGDC antibody that binds to the same TRGDC epitope as a TRGDC reference antibody. In another aspect, provided is a TRGDC antibody that binds an epitope on TRGDC that overlaps with the epitope on TRGDC bound by a TRGDC reference antibody. In some embodiments, the TRGDC reference antibody comprises a VH CDR1, VH CDR2, and VH CDR3 of a TRGDC reference antibody provided herein. In some embodiments, the TRGDC reference antibody comprises a VL CDR1, VL CDR2, and VL CDR3 of a TRGDC reference antibody provided herein. In some embodiments, the TRGDC reference antibody comprises a VH CDR1, VH CDR2, VH CDR3, a VL CDR1, VL CDR2, and VL CDR3 of a TRGDC reference antibody provided herein. In some embodiments, the TRGDC reference antibody comprises a VH of a TRGDC reference antibody provided herein. In some embodiments, the TRGDC reference antibody comprises a VL of a TRGDC reference antibody provided herein. In some embodiments, the TRGDC reference antibody comprises a VH and a VL of a TRGDC reference antibody provided herein. In some embodiments, the TRGDC reference antibody comprises a VH CDR1, VH CDR2, VH CDR3, a VL CDR1, VL CDR2, and VL CDR3 of a TRGDC reference antibody provided herein. In some embodiments, the VH CDR1, VH CDR2, VH CDR3, VL CDR1, VL CDR2, and VL CDR3 amino acid sequences of the TRGDC reference antibody are according to the Kabat numbering system. In some embodiments, the VH CDR1, VH CDR2, VH CDR3, VL CDR1, VL CDR2, and VL CDR3 amino acid sequences of the TRGDC reference antibody are according to the Chothia numbering system. In some embodiments, the VH CDR1, VH CDR2, VH CDR3, VL CDR1, VL CDR2, and VL CDR3 amino acid sequences of the TRGDC reference antibody are according to the AbM numbering system. In some embodiments, the VH CDR1, VH CDR2, VH CDR3, VL CDR1, VL CDR2, and VL CDR3 amino acid sequences of the TRGDC reference antibody are according to the Contact numbering system. In some embodiments, the VH CDR1, VH CDR2, VH CDR3, VL CDR1, VL CDR2, and VL CDR3 amino acid sequences of the TRGDC reference antibody are according to the IMGT numbering system. In certain embodiments, the antibody is a multispecific antibody. In some embodiments, the antibody is a bispecific antibody. In certain embodiments, the TRGDC reference antibody is a multispecific antibody. In some embodiments, the TRGDC reference antibody is a bispecific antibody.

[0302] In some embodiments described herein, immune effector properties of the antibodies provided herein can be enhanced or silenced through Fc modifications by techniques known to those skilled in the art. For example, Fc effector functions such as Clq binding, complement dependent cytotoxicity (CDC), antibody-dependent cell-mediated cytotoxicity (ADCC), antibody-dependent cell-mediated phagocytosis (ADCP), down regulation of cell surface receptors (e.g., B cell receptor; BCR), etc. can be provided and/or controlled by modifying residues in the Fc responsible for these activities.

[0303] “Antibody-dependent cell-mediated cytotoxicity” or “ADCC” refers to a cell-mediated reaction in which non-specific cytotoxic cells that express Fc receptors (FcRs) (e.g. Natural Killer (NK) cells, neutrophils, and macrophages) recognize bound antibody on a target cell and subsequently cause lysis of the target cell.

[0304] The ability of antibodies to induce ADCC can be enhanced by engineering their oligosaccharide component. Human IgG1 or IgG3 are N-glycosylated at Asn297 with the majority of the glycans in the well-known biantennary G0, G0F, G1, G1F, G2 or G2F forms. Antibodies produced by non-engineered CHO cells typically have a glycan fucose content of about at least 85%. The removal of the core fucose from the biantennary complex-type oligosaccharides attached to the Fc regions enhances the ADCC of antibodies via improved FcγRIIIa binding without altering antigen binding or CDC activity. Such Abs can be achieved using different methods reported to lead to the successful expression of relatively high defucosylated antibodies bearing the biantennary complex-type of Fc oligosaccharides such as control of culture osmolality (Konno et al., Cytotechnology 64:249-65, 2012), application of a variant CHO line Lec13 as the host cell line (Shields et al., J Biol Chem 277:26733-26740, 2002), application of a variant CHO line EB66 as the host cell line (Olivier et al., MAbs; 2(4), 2010; Epub ahead of print; PMID:20562582), application of a rat hybridoma cell line YB2/0 as the host cell line (Shinkawa et al., J Biol Chem 278:3466-3473, 2003), introduction of small interfering RNA specifically against the α-1,6-fucosyltrasferase (FUT8) gene (Mori et al., Biotechnol Bioeng 88:901-908, 2004), or coexpression of β-1,4-N-acetylglucosaminyltransferase III and golgi α-mannosidase II or a potent alpha-mannosidase I inhibitor, kifunensine (Ferrara et al., J Biol Chem 281:5032-5036, 2006, Ferrara et al., Biotechnol Bioeng 93:851-861, 2006; Xhou et al., Biotechnol Bioeng 99:652-65, 2008).

[0305] In some embodiments described herein, ADCC elicited by the antibodies provided herein can also be enhanced by certain substitutions in the antibody Fc. Exemplary substitutions are for example substitutions at amino acid positions 256, 290, 298, 312, 356, 330, 333, 334, 360, 378 or 430 (residue numbering according to the EU index) as described in U.S. Pat. No. 6,737,056.

[0306] In some embodiments, a TRGV9 antibody provided herein is chimeric. In some embodiments, a TRGV9 antibody provided herein is human. In some embodiments, a TRGV9 antibody provided herein is humanized. In certain embodiments, a TRGV9 antibody provided herein is an isolated TRGV9 antibody. In some embodiments, a TRGV9 antigen binding fragment provided herein is chimeric. In some embodiments, a TRGV9 antigen binding fragment provided herein is human. In some embodiments, a TRGV9 antigen binding fragment provided herein is humanized. In certain embodiments, a TRGV9 antigen binding fragment provided herein is an isolated TRGV9 antigen binding fragment. In some embodiments, a TRGV9 antibody provided herein is an IgG antibody. In some embodiments, the IgG antibody is an IgG1 antibody. In some embodiments, the IgG antibody is an IgG2 antibody. In some embodiments, the IgG antibody is an IgG3 antibody. In some embodiments, the IgG antibody is an IgG4 antibody. In some embodiments, a TRGV9 antibody provided herein is multivalent. In some embodiments, the antibody is capable of binding at least three antigens. In some embodiments, a TRGV9 antibody provided herein is multivalent. In some embodiments, the antibody is capable of binding at least four antigens. In some embodiments, the antibody is capable of binding at least five antigens.

[0307] In some embodiments, a TRGV9 multispecific antibody provided herein is chimeric. In some embodiments, a TRGV9 multispecific antibody provided herein is human. In some embodiments, a TRGV9 multispecific antibody provided herein is humanized. In certain embodiments, a TRGV9 multispecific antibody provided herein is an isolated TRGV9 multispecific antibody. In some embodiments, a TRGV9 multispecific antibody comprising a TRGV9 antigen binding fragment provided herein is chimeric. In some embodiments, a TRGV9 multispecific antibody comprising a TRGV9 antigen binding fragment provided herein is human. In some embodiments, a TRGV9 multispecific antibody comprising a TRGV9 antigen binding fragment provided herein is humanized. In certain embodiments, a TRGV9 multispecific antibody comprising a TRGV9 antigen binding fragment provided herein is an isolated TRGV9 multispecific antibody.

[0308] In some embodiments of the TRGV9 multispecific antibodies provided herein, the first binding domain is human. In some embodiments, the second binding domain is human. In some embodiments of the TRGV9 multispecific antibodies provided herein, both the first binding domain and the second binding domain are human. In some embodiments of the TRGV9 multispecific antibodies provided herein, the first binding domain is humanized. In some embodiments of the TRGV9 multispecific antibodies provided herein, the second binding domain is humanized. In some embodiments of the TRGV9 multispecific antibodies provided herein, both the first binding domain and the second binding domain are humanized. In some embodiments of the TRGV9 multispecific antibodies provided herein, both the first binding domain is human and the second binding domain is humanized. In some embodiments of the TRGV9 multispecific antibodies provided herein, both the first binding domain is humanized and the second binding domain is human.

[0309] In some embodiments, a TRGV9 multispecific antibody provided herein is multivalent. In some embodiments, the multispecific antibody is capable of binding at least three antigens. In some embodiments, the multispecific antibody is capable of binding at least five antigens. In certain embodiments, the multispecific antibody is a multispecific antibody. In some embodiments, a TRGV9 multispecific antibody provided herein is an IgG antibody. In some embodiments, the IgG antibody is an IgG1 antibody. In some embodiments, the IgG antibody is an IgG2 antibody. In some embodiments, the IgG antibody is an IgG3 antibody. In some embodiments, the IgG antibody is an IgG4 antibody.

[0310] In certain embodiments, the antibodies provided herein are part of a multispecific antibody. In some embodiments, the multispecific antibody comprises a first binding domain that binds to a TRGV9 antigen. In some embodiments, the multispecific antibody comprises a first binding domain that binds to a TRGV9 antigen and comprises a second binding domain that binds to a second target antigen, as provided herein. In certain embodiments, the multispecific antibody binds to a TRGV9 antigen, a second target antigen, and one or more additional antigens. In some embodiments of the various antibodies provided herein, the antibody binds to an epitope of a given antigen.

[0311] In some embodiments, a TRDV2 antibody provided herein is chimeric. In some embodiments, a TRDV2 antibody provided herein is human. In some embodiments, a TRDV2 antibody provided herein is humanized. In certain embodiments, a TRDV2 antibody provided herein is an isolated TRDV2 antibody. In some embodiments, a TRDV2 antigen binding fragment provided herein is chimeric. In some embodiments, a TRDV2 antigen binding fragment provided herein is human. In some embodiments, a TRDV2 antigen binding fragment provided herein is humanized. In certain embodiments, a TRDV2 antigen binding fragment provided herein is an isolated TRDV2 antigen binding fragment. In some embodiments, a TRDV2 antibody provided herein is an IgG antibody. In some embodiments, the IgG antibody is an IgG1 antibody. In some embodiments, the IgG antibody is an IgG2 antibody. In some embodiments, the IgG antibody is an IgG3 antibody. In some embodiments, the IgG antibody is an IgG4 antibody. In some embodiments, a TRDV2 antibody provided herein is multivalent. In some embodiments, the antibody is capable of binding at least three antigens. In some embodiments, the antibody is capable of binding at least four antigens. In some embodiments, the antibody is capable of binding at least five antigens.

[0312] In some embodiments, a TRDV2 multispecific antibody provided herein is 15 chimeric. In some embodiments, a TRDV2 multispecific antibody provided herein is human. In some embodiments, a TRDV2 multispecific antibody provided herein is humanized. In certain embodiments, a TRDV2 multispecific antibody provided herein is an isolated TRDV2 multispecific antibody. In some embodiments, a TRDV2 multispecific antibody comprising a TRDV2 antigen binding fragment provided herein is chimeric. In some embodiments, a TRDV2 multispecific antibody comprising a TRDV2 antigen binding fragment provided herein is human. In some embodiments, a TRDV2 multispecific antibody comprising a TRDV2 antigen binding fragment provided herein is humanized. In certain embodiments, a TRDV2 multispecific antibody comprising a TRDV2 antigen binding fragment provided herein is an isolated TRDV2 multispecific antibody.

[0313] In some embodiments of the TRDV2 multispecific antibodies provided herein, the first binding domain is human. In some embodiments, the second binding domain is human. In some embodiments of the TRDV2 multispecific antibodies provided herein, both the first binding domain and the second binding domain are human. In some embodiments of the TRDV2 multispecific antibodies provided herein, the first binding domain is humanized. In some embodiments of the TRDV2 multispecific antibodies provided herein, the second binding domain is humanized. In some embodiments of the TRDV2 multispecific antibodies provided herein, both the first binding domain and the second binding domain are humanized. In some embodiments of the TRDV2 multispecific antibodies provided herein, both the first binding domain is human and the second binding domain is humanized. In some embodiments of the TRDV2 multispecific antibodies provided herein, both the first binding domain is humanized and the second binding domain is human.

[0314] In some embodiments, a TRDV2 multispecific antibody provided herein is multivalent. In some embodiments, the multispecific antibody is capable of binding at least three antigens. In some embodiments, the multispecific antibody is capable of binding at least five antigens. In certain embodiments, the multispecific antibody is a multispecific antibody. In some embodiments, a TRDV2 multispecific antibody provided herein is an IgG antibody. In some embodiments, the IgG antibody is an IgG1 antibody. In some embodiments, the IgG antibody is an IgG2 antibody. In some embodiments, the IgG antibody is an IgG3 antibody. In some embodiments, the IgG antibody is an IgG4 antibody.

[0315] In certain embodiments, the antibodies provided herein are part of a multispecific antibody. In some embodiments, the multispecific antibody comprises a first binding domain that binds to a TRDV2 antigen. In some embodiments, the multispecific antibody comprises a first binding domain that binds to a TRDV2 antigen and comprises a second binding domain that binds to a second target antigen, as provided herein. In certain embodiments, the multispecific antibody binds to a TRDV2 antigen, a second target antigen, and one or more additional antigens. In some embodiments of the various antibodies provided herein, the antibody binds to an epitope of a given antigen.

[0316] In some embodiments, a TRGDC antibody provided herein is chimeric. In some embodiments, a TRGDC antibody provided herein is human. In some embodiments, a TRGDC antibody provided herein is humanized. In certain embodiments, a TRGDC antibody provided herein is an isolated TRGDC antibody. In some embodiments, a TRGDC antigen binding fragment provided herein is chimeric. In some embodiments, a TRGDC antigen binding fragment provided herein is human. In some embodiments, a TRGDC antigen binding fragment provided herein is humanized. In certain embodiments, a TRGDC antigen binding fragment provided herein is an isolated TRGDC antigen binding fragment. In some embodiments, a TRGDC antibody provided herein is an IgG antibody. In some embodiments, the IgG antibody is an IgG1 antibody. In some embodiments, the IgG antibody is an IgG2 antibody. In some embodiments, the IgG antibody is an IgG3 antibody. In some embodiments, the IgG antibody is an IgG4 antibody. In some embodiments, a TRGDC antibody provided herein is multivalent. In some embodiments, the antibody is capable of binding at least three antigens. In some embodiments, the antibody is capable of binding at least four antigens. In some embodiments, the antibody is capable of binding at least five antigens.

[0317] In some embodiments, a TRGDC multispecific antibody provided herein is chimeric. In some embodiments, a TRGDC multispecific antibody provided herein is human. In some embodiments, a TRGDC multispecific antibody provided herein is humanized. In certain embodiments, a TRGDC multispecific antibody provided herein is an isolated TRGDC multispecific antibody. In some embodiments, a TRGDC multispecific antibody comprising a TRGDC antigen binding fragment provided herein is chimeric. In some embodiments, a TRGDC multispecific antibody comprising a TRGDC antigen binding fragment provided herein is human. In some embodiments, a TRGDC multispecific antibody comprising a TRGDC antigen binding fragment provided herein is humanized. In certain embodiments, a TRGDC multispecific antibody comprising a TRGDC antigen binding fragment provided herein is an isolated TRGDC multispecific antibody.

[0318] In some embodiments of the TRGDC multispecific antibodies provided herein, the first binding domain is human. In some embodiments, the second binding domain is human. In some embodiments of the TRGDC multispecific antibodies provided herein, both the first binding domain and the second binding domain are human. In some embodiments of the TRGDC multispecific antibodies provided herein, the first binding domain is humanized. In some embodiments of the TRGDC multispecific antibodies provided herein, the second binding domain is humanized. In some embodiments of the TRGDC multispecific antibodies provided herein, both the first binding domain and the second binding domain are humanized. In some embodiments of the TRGDC multispecific antibodies provided herein, both the first binding domain is human and the second binding domain is humanized. In some embodiments of the TRGDC multispecific antibodies provided herein, both the first binding domain is humanized and the second binding domain is human.

[0319] In some embodiments, a TRGDC multispecific antibody provided herein is multivalent. In some embodiments, the multispecific antibody is capable of binding at least three antigens. In some embodiments, the multispecific antibody is capable of binding at least five antigens. In certain embodiments, the multispecific antibody is a multispecific antibody. In some embodiments, a TRGDC multispecific antibody provided herein is an IgG antibody. In some embodiments, the IgG antibody is an IgG1 antibody. In some embodiments, the IgG antibody is an IgG2 antibody. In some embodiments, the IgG antibody is an IgG3 antibody. In some embodiments, the IgG antibody is an IgG4 antibody.

[0320] In certain embodiments, the antibodies provided herein are part of a multispecific antibody. In some embodiments, the multispecific antibody comprises a first binding domain that binds to a TRGDC antigen. In some embodiments, the multispecific antibody comprises a first binding domain that binds to a TRGDC antigen and comprises a second binding domain that binds to a second target antigen, as provided herein. In certain embodiments, the multispecific antibody binds to a TRGDC antigen, a second target antigen, and one or more additional antigens. In some embodiments of the various antibodies provided herein, the antibody binds to an epitope of a given antigen.

[0321] Also provided is a nucleic acid sequence encoding an antibody provided herein. In another general aspect, provide is a vector comprising an isolated nucleic acid sequence encoding an antibody provided herein. In another general aspect, provided is a vector comprising an isolated nucleic acid sequence encoding an antibody provided herein. Also provided is a vector comprising a nucleic acid sequence encoding an antibody provided herein. Also provided is a host cell comprising a vector comprising a nucleic acid sequence encoding an antibody provided herein. Also provided is a kit comprising the vector comprising a nucleic acid sequence encoding an antibody provided herein, and packaging for the same. In another general aspect, provided herein is an isolated nucleic acid sequence encoding a monoclonal antibody or antigen-binding fragment thereof provided herein. In certain embodiments, the antibody is a TRGV9 antibody. In certain embodiments, the antibody is a TRDV2 antibody. In certain embodiments, the antibody is a TRGDC antibody.

[0322] It will be appreciated by those skilled in the art that the coding sequence of a protein can be changed (e.g., replaced, deleted, inserted, etc.) without changing the amino acid sequence of the protein. Accordingly, it will be understood by those skilled in the art that nucleic acid sequences encoding antibodies provided herein can be altered without changing the amino acid sequences of the proteins.

[0323] Any vector known to those skilled in the art in view of the present disclosure can be used, such as a plasmid, a cosmid, a phage vector or a viral vector. In some embodiments, the vector is a recombinant expression vector such as a plasmid. The vector can include any element to establish a conventional function of an expression vector, for example, a promoter, ribosome binding element, terminator, enhancer, selection marker, and origin of replication. The promoter can be a constitutive, inducible or repressible promoter. A number of expression vectors capable of delivering nucleic acids to a cell are known in the art and can be used herein for production of an antibody or antigen-binding fragment thereof in the cell. Conventional cloning techniques or artificial gene synthesis can be used to generate a recombinant expression vector according to certain embodiments. Such techniques are well known to those skilled in the art in view of the present disclosure.

[0324] Also provided is a host cell comprising an isolated nucleic acid sequence encoding an antibody provided herein. Also provided is a host cell comprising an isolated nucleic acid sequence encoding an antigen binding fragment provided herein. Any host cell known to those skilled in the art in view of the present disclosure can be used for recombinant expression of antibodies or antigen-binding fragments thereof provided herein. In some embodiments, the host cells are E. coli TG1 or BL21 cells (for expression of, e.g., an scFv or Fab antibody), CHO-DG44 or CHO-K1 cells or HEK293 cells (for expression of, e.g., a full-length IgG antibody). According to particular embodiments, the recombinant expression vector is transformed into host cells by conventional methods such as chemical transfection, heat shock, or electroporation, where it is stably integrated into the host cell genome such that the recombinant nucleic acid sequence is effectively expressed.

[0325] Also provided are methods of producing an antibody disclosed herein. The methods comprise culturing a cell comprising a nucleic acid encoding the antibody under conditions to produce an antibody and recovering the antibody from the cell or cell culture (e.g., from the supernatant). Expressed antibodies can be harvested from the cells and purified according to conventional techniques known in the art and as described herein.

### Pharmaceutical Compositions

[0326] In another general aspect, provided is a pharmaceutical composition comprising a TRGV9 antibody provided herein and a pharmaceutically acceptable carrier. In another general aspect, provided is a pharmaceutical composition comprising a TRDV2 antibody provided herein and a pharmaceutically acceptable carrier. In another general aspect, provided is a pharmaceutical composition comprising a TRGDC antibody provided herein and a pharmaceutically acceptable carrier. In certain embodiments, the antibody is isolated. Also provided is a method of producing the pharmaceutical composition, comprising combining the antibody with a pharmaceutically acceptable carrier to obtain the pharmaceutical composition.

[0327] In another aspect, provided herein is a pharmaceutical composition comprising a comprising: (a) a first binding domain that binds to TRGV9, and (b) a second binding domain that binds to a second target, and a pharmaceutically acceptable carrier. In another aspect, provided herein is a pharmaceutical composition comprising a comprising: (a) a first binding domain that binds to TRDV2, and (b) a second binding domain that binds to a second target, and a pharmaceutically acceptable carrier. In another aspect, provided herein is a pharmaceutical composition comprising a comprising: (a) a first binding domain that binds to TRGDC, and (b) a second binding domain that binds to a second target, and a pharmaceutically acceptable carrier. Any of the multispecific antibodies provided herein are contemplated in the pharmaceutical compositions.

[0328] The term “pharmaceutical composition” as used herein means a product comprising an antibody provided herein together with a pharmaceutically acceptable carrier. Antibodies of provided herein and compositions comprising them are also useful in the manufacture of a medicament for therapeutic applications.

[0329] As used herein, the term “carrier” refers to any excipient, diluent, filler, salt, buffer, stabilizer, solubilizer, oil, lipid, lipid containing vesicle, microsphere, liposomal encapsulation, or other material well known in the art for use in pharmaceutical formulations. It will be understood that the characteristics of the carrier, excipient or diluent will depend on the route of administration for a particular application. As used herein, the term “pharmaceutically acceptable carrier” refers to a non-toxic material that does not interfere with the effectiveness of a composition provided herein the biological activity of a composition provided herein. According to particular embodiments, in view of the present disclosure, any pharmaceutically acceptable carrier suitable for use in an antibody pharmaceutical composition can be used herein.

[0330] The formulation of pharmaceutically active ingredients with pharmaceutically acceptable carriers is known in the art, e.g., Remington: The Science and Practice of Pharmacy (e.g. 21st edition (2005), and any later editions). Non-limiting examples of additional ingredients include: buffers, diluents, solvents, tonicity regulating agents, preservatives, stabilizers, and chelating agents. One or more pharmaceutically acceptable carriers can be used in formulating the pharmaceutical compositions provided herein.

[0331] In one embodiment, the pharmaceutical composition is a liquid formulation. A preferred example of a liquid formulation is an aqueous formulation, i.e., a formulation comprising water. The liquid formulation can comprise a solution, a suspension, an emulsion, a microemulsion, a gel, and the like. An aqueous formulation typically comprises at least 50% w/w water, or at least 60%, 70%, 75%, 80%, 85%, 90%, or at least 95% w/w of water.

[0332] In one embodiment, the pharmaceutical composition can be formulated as an injectable which can be injected, for example, via an injection device (e.g., a syringe or an infusion pump). The injection can be delivered subcutaneously, intramuscularly, intraperitoneally, intravitreally, or intravenously, for example.

[0333] In another embodiment, the pharmaceutical composition is a solid formulation, e.g., a freeze-dried or spray-dried composition, which can be used as is, or whereto the physician or the patient adds solvents, and/or diluents prior to use. Solid dosage forms can include tablets, such as compressed tablets, and/or coated tablets, and capsules (e.g., hard or soft gelatin capsules). The pharmaceutical composition can also be in the form of sachets, dragees, powders, granules, lozenges, or powders for reconstitution, for example.

[0334] The dosage forms can be immediate release, in which case they can comprise a water-soluble or dispersible carrier, or they can be delayed release, sustained release, or modified release, in which case they can comprise water-insoluble polymers that regulate the rate of dissolution of the dosage form in the gastrointestinal tract or under the skin.

[0335] In other embodiments, the pharmaceutical composition can be delivered intranasally, intrabuccally, or sublingually.

[0336] The pH in an aqueous formulation can be between pH 3 and pH 10. In one embodiment, the pH of the formulation is from about 7.0 to about 9.5. In another embodiment, the pH of the formulation is from about 3.0 to about 7.0.

[0337] In another embodiment, the pharmaceutical composition comprises a buffer. Non-limiting examples of buffers include: arginine, aspartic acid, bicine, citrate, disodium hydrogen phosphate, fumaric acid, glycine, glycylglycine, histidine, lysine, maleic acid, malic acid, sodium acetate, sodium carbonate, sodium dihydrogen phosphate, sodium phosphate, succinate, tartaric acid, tricine, and tris(hydroxymethyl)-aminomethane, and mixtures thereof. The buffer can be present individually or in the aggregate, in a concentration from about 0.01 mg/ml to about 50 mg/ml, for example from about 0.1 mg/ml to about 20 mg/ml. Pharmaceutical compositions comprising each one of these specific buffers constitute alternative embodiments.

[0338] In another embodiment, the pharmaceutical composition comprises a preservative. Non-limiting examples of preservatives include: benzethonium chloride, benzoic acid, benzyl alcohol, bronopol, butyl 4-hydroxybenzoate, chlorobutanol, chlorocresol, chlorohexidine, chlorphenesin, o-cresol, m-cresol, p-cresol, ethyl 4-hydroxybenzoate, imidurea, methyl 4-hydroxybenzoate, phenol, 2-phenoxyethanol, 2-phenylethanol, propyl 4-hydroxybenzoate, sodium dehydroacetate, thiomerosal, and mixtures thereof. The preservative can be present individually or in the aggregate, in a concentration from about 0.01 mg/ml to about 50 mg/ml, for example from about 0.1 mg/ml to about 20 mg/ml. Pharmaceutical compositions comprising each one of these specific preservatives constitute alternative embodiments.

[0339] In another embodiment, the pharmaceutical composition comprises an isotonic agent. Non-limiting examples of isotonic agents include a salt (such as sodium chloride), an amino acid (such as glycine, histidine, arginine, lysine, isoleucine, aspartic acid, tryptophan, and threonine), an alditol (such as glycerol, 1,2-propanediol propyleneglycol), 1,3-propanediol, and 1,3-butanediol), polyethyleneglycol (e.g. PEG400), and mixtures thereof. Another example of an isotonic agent includes a sugar. Non-limiting examples of sugars can include mono-, di-, or polysaccharides, or water-soluble glucans, including for example fructose, glucose, mannose, sorbose, xylose, maltose, lactose, sucrose, trehalose, dextran, pullulan, dextrin, cyclodextrin, alpha and beta-HPCD, soluble starch, hydroxyethyl starch, and sodium carboxymethyl-cellulose. Another example of an isotonic agent is a sugar alcohol, wherein the term “sugar alcohol” is defined as a C(4-8) hydrocarbon having at least one —OH group. Non-limiting examples of sugar alcohols include mannitol, sorbitol, inositol, galactitol, dulcitol, xylitol, and arabitol. The isotonic agent can be present individually or in the aggregate, in a concentration from about 0.01 mg/ml to about 50 mg/ml, for example from about 0.1 mg/ml to about 20 mg/ml. Pharmaceutical compositions comprising each one of these specific isotonic agents constitute alternative embodiments.

[0340] In another embodiment, the pharmaceutical composition comprises a chelating agent. Non-limiting examples of chelating agents include citric acid, aspartic acid, salts of ethylenediaminetetraacetic acid (EDTA), and mixtures thereof. The chelating agent can be present individually or in the aggregate, in a concentration from about 0.01 mg/ml to about 50 mg/ml, for example from about 0.1 mg/ml to about 20 mg/ml. Pharmaceutical compositions comprising each one of these specific chelating agents constitute alternative embodiments.

[0341] In another embodiment, the pharmaceutical composition comprises a stabilizer. Non-limiting examples of stabilizers include one or more aggregation inhibitors, one or more oxidation inhibitors, one or more surfactants, and/or one or more protease inhibitors.

[0342] In another embodiment, the pharmaceutical composition comprises a stabilizer, wherein said stabilizer is carboxy-/hydroxycellulose and derivates thereof (such as HPC, HPC-SL, HPC-L and HPMC), cyclodextrins, 2-methylthioethanol, polyethylene glycol (such as PEG 3350), polyvinyl alcohol (PVA), polyvinyl pyrrolidone, salts (such as sodium chloride), sulphur-containing substances such as monothioglycerol), or thioglycolic acid. The stabilizer can be present individually or in the aggregate, in a concentration from about 0.01 mg/ml to about 50 mg/ml, for example from about 0.1 mg/ml to about 20 mg/ml. Pharmaceutical compositions comprising each one of these specific stabilizers constitute alternative embodiments.

[0343] In further embodiments, the pharmaceutical composition comprises one or more surfactants, preferably a surfactant, at least one surfactant, or two different surfactants. The term “surfactant” refers to any molecules or ions that are comprised of a water-soluble (hydrophilic) part, and a fat-soluble (lipophilic) part. The surfactant can, for example, be selected from the group consisting of anionic surfactants, cationic surfactants, nonionic surfactants, and/or zwitterionic surfactants. The surfactant can be present individually or in the aggregate, in a concentration from about 0.1 mg/ml to about 20 mg/ml. Pharmaceutical compositions comprising each one of these specific surfactants constitute alternative embodiments.

[0344] In a further embodiment, the pharmaceutical composition comprises one or more protease inhibitors, such as, e.g., EDTA, and/or benzamidine hydrochloric acid (HCl). The protease inhibitor can be present individually or in the aggregate, in a concentration from about 0.1 mg/ml to about 20 mg/ml. Pharmaceutical compositions comprising each one of these specific protease inhibitors constitute alternative embodiments.

[0345] In another general aspect, provided herein is a method of producing a pharmaceutical composition comprising an antibody or antigen-binding fragment thereof provided herein, comprising combining an antibody or antigen-binding fragment thereof with a pharmaceutically acceptable carrier to obtain the pharmaceutical composition.

### Methods of Use

[0346] The functional activity of antibodies provided herein can be characterized by methods known in the art and as described herein. Methods for characterizing antibodies and antigen-binding fragments thereof include, but are not limited to, affinity and specificity assays including Biacore, ELISA, and OctetRed analysis; binding assays to detect the binding of antibodies to target cells by FACS; binding assays to detect the binding of antibodies to the target antigen on cells. According to particular embodiments, the methods for characterizing antibodies and antigen-binding fragments thereof include those described below. In certain embodiments, the antibody is a TRGV9 antibody. In certain embodiments, the antibody is a TRDV2 antibody. In certain embodiments, the antibody is a TRGDC antibody.

[0347] In one aspect, provided is a method of activating a T cell expressing TRGV9, comprising contacting the T cell with a TRGV9 antibody provided herein. In some embodiments, the contacting results in an increase in CD69, CD25, and/or Granzyme B expression, as compared to a control T cell expressing TRGV9.

[0348] In another general aspect, provided is a method of inactivating a T cell expressing TRGV9, comprising contacting the T cell with an antibody that binds to a TRGV9 provided herein. In another general aspect, provided is a method of blocking activation of a T cell expressing TRGV9, comprising contacting the T cell with an antibody that binds to a TRGV9 provided herein. In another general aspect, provided is a method of modulating the activation of a T cell expressing TRGV9, comprising contacting the T cell with an antibody that binds to a TRGV9 provided herein.

[0349] In another aspect, provided herein is a method of directing a T cell expressing TRGV9 to a target cell, the method comprising contacting the T cell with a multispecific TRGV9 antibody provided herein. In another aspect, provided herein is a method of directing a T cell expressing TRGV9 to a target cell, the method comprising contacting the T cell with a pharmaceutical composition comprising a multispecific TRGV9 antibody provided herein. In some embodiments, the contacting directs the T cell to the target cell. Also provided is a method of targeting an antigen on the surface of a target cell, the method comprising exposing the target cell to a TRGV9 multispecific antibody provided herein. Also provided is a method of targeting an antigen on the surface of a target cell, the method comprising exposing the target cell to a pharmaceutical composition comprising a TRGV9 multispecific antibody provided herein. In another general aspect, provided is a method of targeting an antigen on the surface of a target cell, the method comprising exposing the target cell to a TRGV9 multispecific antibody provided herein. In another general aspect, provided is a method of targeting an antigen on the surface of a target cell, the method comprising exposing the target cell to a pharmaceutical composition comprising a TRGV9 multispecific antibody provided herein.

[0350] Also provided herein is a method of treating a disease or disorder in a subject, comprising administering to the subject a TRGV9 antibody provided herein. Also provided herein is a method of treating a disease or disorder in a subject, comprising administering to the subject a TRGV9 antigen binding fragment provided herein. Also provided herein is a method of treating a disease or disorder in a subject, comprising administering to the subject a pharmaceutical composition comprising a TRGV9 antibody provided herein. Also provided herein is a method of treating a disease or disorder in a subject, comprising administering to the subject a pharmaceutical composition comprising a TRGV9 antigen binding fragment provided herein. In a specific embodiment, the disease or disorder is caused all or in part by target cells expressing the second target.

[0351] In some embodiments, also provided is a method of directing a γδ T cell to a target cell, the method comprising contacting the γδ T cell with a multispecific TRGV9 antibody provided herein. In some embodiments, also provided is a TRGV9 antibody provided herein for use in directing a γδ T cell to a target cell. In some embodiments, also provided is a TRGV9 multispecific antibody provided herein for use in the manufacture of a medicament for directing a γδ T cell to a target cell. In certain embodiments, the target cell expresses the second target. In some embodiments, the contacting directs the γδ T cell to the target cell.

[0352] In some embodiments, also provided is a method of inhibiting growth or proliferation of target cells, the method comprising contacting the target cells with a multispecific TRGV9 antibody provided herein. In some embodiments, also provided is a TRGV9 multispecific antibody provided herein for use in inhibiting growth or proliferation of target cells. In some embodiments, also provided is a TRGV9 multispecific antibody provided herein for use in the manufacture of a medicament for inhibiting growth or proliferation of target cells. In certain embodiments, the target cells express the second target on the cell surface. In specific embodiments, the contacting the target cells with the multispecific TRGV9 antibody inhibits growth or proliferation of the target cells. In certain embodiments, the target cells are in the presence of a T cell expressing TRGV9 while in contact with the multispecific antibody. In a specific embodiment, the T cell expressing TRGV9 is a γδ T cell.

[0353] In some embodiments, also provided is a method for eliminating target cells in a subject, comprising administering an effective amount of a multispecific TRGV9 antibody provided herein to the subject. In some embodiments, also provided is a multispecific TRGV9 antibody provided herein for use in eliminating target cells in a subject. In some embodiments, also provided is a TRGV9 multispecific antibody provided herein for use in the manufacture of a medicament for the elimination of target cells in a subject. In some embodiments, the target cells express the second target on the cell surface. In certain embodiments, the target cells are in the presence of a T cell expressing TRGV9 in the subject. In a specific embodiment, the T cell expressing TRGV9 is a γδ T cell. In a specific embodiment, the subject is a subject in need thereof.

[0354] In some embodiments, also is a method for treating a disease caused all or in part by target cells in a subject, comprising administering an effective amount of a multispecific TRGV9 antibody provided herein to the subject. In some embodiments, also is a TRGV9 multispecific antibody for use in the treatment of a disease caused all or in part by target cells in a subject. In some embodiments, also provided is a TRGV9 multispecific antibody provided herein for use in the manufacture of a medicament for the treatment of a disease caused all or in part by target cells in a subject. In some embodiments, the target cells express the second target on the cell surface. In certain embodiments, the target cells are in the presence of a T cell expressing TRGV9 in the subject. In a specific embodiment, the T cell expressing TRGV9 is a γδ T cell. In a specific embodiment, the subject is a subject in need thereof. In some embodiments, the second target is a cancer antigen. In some embodiments, the second target is a tumor associated antigen.

[0355] Also provided is a method of activating a T cell expressing TRDV2, comprising contacting the T cell with a TRDV2 antibody provided herein. In some embodiments, the contacting results in an increase in CD69, CD25, and/or Granzyme B expression, as compared to a control T cell expressing TRDV2.

[0356] In another general aspect, provided is a method of inactivating a T cell expressing TRDV2, comprising contacting the T cell with an antibody that binds to a TRDV2 provided herein. In another general aspect, provided is a method of blocking activation of a T cell expressing TRDV2, comprising contacting the T cell with an antibody that binds to a TRDV2 provided herein. In another general aspect, provided is a method of modulating the activation of a T cell expressing TRDV2, comprising contacting the T cell with an antibody that binds to a TRDV2 provided herein.

[0357] In another aspect, provided herein is a method of directing a T cell expressing TRDV2 to a target cell, the method comprising contacting the T cell with a multispecific TRDV2 antibody provided herein. In another aspect, provided herein is a method of directing a T cell expressing TRDV2 to a target cell, the method comprising contacting the T cell with a pharmaceutical composition comprising a multispecific TRDV2 antibody provided herein. In some embodiments, the contacting directs the T cell to the target cell. Also provided is a method of targeting an antigen on the surface of a target cell, the method comprising exposing the target cell to a TRDV2 multispecific antibody provided herein. Also provided is a method of targeting an antigen on the surface of a target cell, the method comprising exposing the target cell to a pharmaceutical composition comprising a TRDV2 multispecific antibody provided herein. In another general aspect, provided is a method of targeting an antigen on the surface of a target cell, the method comprising exposing the target cell to a TRDV2 multispecific antibody provided herein. In another general aspect, provided is a method of targeting an antigen on the surface of a target cell, the method comprising exposing the target cell to a pharmaceutical composition comprising a TRDV2 multispecific antibody provided herein.

[0358] Also provided herein is a method of treating a disease or disorder in a subject, comprising administering to the subject a TRDV2 antibody provided herein. Also provided herein is a method of treating a disease or disorder in a subject, comprising administering to the subject a TRDV2 antigen binding fragment provided herein. Also provided herein is a method of treating a disease or disorder in a subject, comprising administering to the subject a pharmaceutical composition comprising a TRDV2 antibody provided herein. Also provided herein is a method of treating a disease or disorder in a subject, comprising administering to the subject a pharmaceutical composition comprising a TRDV2 antigen binding fragment provided herein. In a specific embodiment, the disease or disorder is caused all or in part by target cells expressing the second target.

[0359] In some embodiments, also provided is a method of directing a γδ T cell to a target cell, the method comprising contacting the γδ T cell with a multispecific TRDV2 antibody provided herein. In some embodiments, also provided is a TRDV2 antibody provided herein for use in directing a γδ T cell to a target cell. In some embodiments, also provided is a TRDV2 multispecific antibody provided herein for use in the manufacture of a medicament for directing a γδ T cell to a target cell. In certain embodiments, the target cell expresses the second target. In some embodiments, the contacting directs the γδ T cell to the target cell.

[0360] In some embodiments, also provided is a method of inhibiting growth or proliferation of target cells, the method comprising contacting the target cells with a multispecific TRDV2 antibody provided herein. In some embodiments, also provided is a TRDV2 multispecific antibody provided herein for use in inhibiting growth or proliferation of target cells. In some embodiments, also provided is a TRDV2 multispecific antibody provided herein for use in the manufacture of a medicament for inhibiting growth or proliferation of target cells. In certain embodiments, the target cells express the second target on the cell surface. In specific embodiments, the contacting the target cells with the multispecific TRDV2 antibody inhibits growth or proliferation of the target cells. In certain embodiments, the target cells are in the presence of a T cell expressing TRDV2 while in contact with the multispecific antibody. In a specific embodiment, the T cell expressing TRDV2 is a γδ T cell.

[0361] In some embodiments, also provided is a method for eliminating target cells in a subject, comprising administering an effective amount of a multispecific TRDV2 antibody provided herein to the subject. In some embodiments, also provided is a multispecific TRDV2 antibody provided herein for use in eliminating target cells in a subject. In some embodiments, also provided is a TRDV2 multispecific antibody provided herein for use in the manufacture of a medicament for the elimination of target cells in a subject. In some embodiments, the target cells express the second target on the cell surface. In certain embodiments, the target cells are in the presence of a T cell expressing TRDV2 in the subject. In a specific embodiment, the T cell expressing TRDV2 is a γδ T cell. In a specific embodiment, the subject is a subject in need thereof.

[0362] In some embodiments, also is a method for treating a disease caused all or in part by target cells in a subject, comprising administering an effective amount of a multispecific TRDV2 antibody provided herein to the subject. In some embodiments, also is a TRDV2 multispecific antibody for use in the treatment of a disease caused all or in part by target cells in a subject. In some embodiments, also provided is a TRDV2 multispecific antibody provided herein for use in the manufacture of a medicament for the treatment of a disease caused all or in part by target cells in a subject. In some embodiments, the target cells express the second target on the cell surface. In certain embodiments, the target cells are in the presence of a T cell expressing TRDV2 in the subject. In a specific embodiment, the T cell expressing TRDV2 is a γδ T cell. In a specific embodiment, the subject is a subject in need thereof. In some embodiments, the second target is a cancer antigen. In some embodiments, the second target is a tumor associated antigen.

[0363] Also provided is a method of activating a T cell expressing TRGDC, comprising 20 contacting the T cell with a TRGDC antibody provided herein. In some embodiments, the contacting results in an increase in CD69, CD25, and/or Granzyme B expression, as compared to a control T cell expressing TRGDC.

[0364] In another general aspect, provided is a method of inactivating a T cell expressing TRGDC, comprising contacting the T cell with an antibody that binds to a TRGDC provided herein. In another general aspect, provided is a method of blocking activation of a T cell expressing TRGDC, comprising contacting the T cell with an antibody that binds to a TRGDC provided herein. In another general aspect, provided is a method of modulating the activation of a T cell expressing TRGDC, comprising contacting the T cell with an antibody that binds to a TRGDC provided herein.

[0365] In another aspect, provided herein is a method of directing a T cell expressing TRGDC to a target cell, the method comprising contacting the T cell with a multispecific TRGDC antibody provided herein. In another aspect, provided herein is a method of directing a T cell expressing TRGDC to a target cell, the method comprising contacting the T cell with a pharmaceutical composition comprising a multispecific TRGDC antibody provided herein. In some embodiments, the contacting directs the T cell to the target cell. Also provided is a method of targeting an antigen on the surface of a target cell, the method comprising exposing the target cell to a TRGDC multispecific antibody provided herein. Also provided is a method of targeting an antigen on the surface of a target cell, the method comprising exposing the target cell to a pharmaceutical composition comprising a TRGDC multispecific antibody provided herein. In another general aspect, provided is a method of targeting an antigen on the surface of a target cell, the method comprising exposing the target cell to a TRGDC multispecific antibody provided herein. In another general aspect, provided is a method of targeting an antigen on the surface of a target cell, the method comprising exposing the target cell to a pharmaceutical composition comprising a TRGDC multispecific antibody provided herein.

[0366] Also provided herein is a method of treating a disease or disorder in a subject, comprising administering to the subject a TRGDC antibody provided herein. Also provided herein is a method of treating a disease or disorder in a subject, comprising administering to the subject a TRGDC antigen binding fragment provided herein. Also provided herein is a method of treating a disease or disorder in a subject, comprising administering to the subject a pharmaceutical composition comprising a TRGDC antibody provided herein. Also provided herein is a method of treating a disease or disorder in a subject, comprising administering to the subject a pharmaceutical composition comprising a TRGDC antigen binding fragment provided herein. In a specific embodiment, the disease or disorder is caused all or in part by target cells expressing the second target.

[0367] In some embodiments, also provided is a method of directing a γδ T cell to a target cell, the method comprising contacting the γδ T cell with a multispecific TRGDC antibody provided herein. In some embodiments, also provided is a TRGDC antibody provided herein for use in directing a γδ T cell to a target cell. In some embodiments, also provided is a TRGDC multispecific antibody provided herein for use in the manufacture of a medicament for directing a γδ T cell to a target cell. In certain embodiments, the target cell expresses the second target. In some embodiments, the contacting directs the γδ T cell to the target cell.

[0368] In some embodiments, also provided is a method of inhibiting growth or proliferation of target cells, the method comprising contacting the target cells with a multispecific TRGDC antibody provided herein. In some embodiments, also provided is a TRGDC multispecific antibody provided herein for use in inhibiting growth or proliferation of target cells. In some embodiments, also provided is a TRGDC multispecific antibody provided herein for use in the manufacture of a medicament for inhibiting growth or proliferation of target cells. In certain embodiments, the target cells express the second target on the cell surface. In specific embodiments, the contacting the target cells with the multispecific TRGDC antibody inhibits growth or proliferation of the target cells. In certain embodiments, the target cells are in the presence of a T cell expressing TRGDC while in contact with the multispecific antibody. In a specific embodiment, the T cell expressing TRGDC is a γδ T cell.

[0369] In some embodiments, also provided is a method for eliminating target cells in a subject, comprising administering an effective amount of a multispecific TRGDC antibody provided herein to the subject. In some embodiments, also provided is a multispecific TRGDC antibody provided herein for use in eliminating target cells in a subject. In some embodiments, also provided is a TRGDC multispecific antibody provided herein for use in the manufacture of a medicament for the elimination of target cells in a subject. In some embodiments, the target cells express the second target on the cell surface. In certain embodiments, the target cells are in the presence of a T cell expressing TRGDC in the subject. In a specific embodiment, the T cell expressing TRGDC is a γδ T cell. In a specific embodiment, the subject is a subject in need thereof.

[0370] In some embodiments, also is a method for treating a disease caused all or in part by target cells in a subject, comprising administering an effective amount of a multispecific TRGDC antibody provided herein to the subject. In some embodiments, also is a TRGDC multispecific antibody for use in the treatment of a disease caused all or in part by target cells in a subject. In some embodiments, also provided is a TRGDC multispecific antibody provided herein for use in the manufacture of a medicament for the treatment of a disease caused all or in part by target cells in a subject. In some embodiments, the target cells express the second target on the cell surface. In certain embodiments, the target cells are in the presence of a T cell expressing TRGDC in the subject. In a specific embodiment, the T cell expressing TRGDC is a γδ T cell. In a specific embodiment, the subject is a subject in need thereof. In some embodiments, the second target is a cancer antigen. In some embodiments, the second target is a tumor associated antigen.

[0371] In some embodiments, the subject is a subject in need thereof. In some embodiments, the subject is a human. In specific embodiments, the subject is administered an effective amount.

[0372] As used herein, the term “effective amount” refers to an amount of an active ingredient or component that elicits the desired biological or medicinal response in a subject.

[0373] According to particular embodiments, an effective amount refers to the amount of therapy which is sufficient to achieve one, two, three, four, or more of the following effects: (i) reduce or ameliorate the severity of the disease, disorder or condition to be treated or a symptom associated therewith; (ii) reduce the duration of the disease, disorder or condition to be treated, or a symptom associated therewith; (iii) prevent the progression of the disease, disorder or condition to be treated, or a symptom associated therewith; (iv) cause regression of the disease, disorder or condition to be treated, or a symptom associated therewith; (v) prevent the development or onset of the disease, disorder or condition to be treated, or a symptom associated therewith; (vi) prevent the recurrence of the disease, disorder or condition to be treated, or a symptom associated therewith; (vii) reduce hospitalization of a subject having the disease, disorder or condition to be treated, or a symptom associated therewith; (viii) reduce hospitalization length of a subject having the disease, disorder or condition to be treated, or a symptom associated therewith; (ix) increase the survival of a subject with the disease, disorder or condition to be treated, or a symptom associated therewith; (xi) inhibit or reduce the disease, disorder or condition to be treated, or a symptom associated therewith in a subject; and/or (xii) enhance or improve the prophylactic or therapeutic effect(s) of another therapy.

[0374] The effective amount or dosage can vary according to various factors, such as the disease, disorder or condition to be treated, the means of administration, the target site, the physiological state of the subject (including, e.g., age, body weight, health), whether the subject is a human or an animal, other medications administered, and whether the treatment is prophylactic or therapeutic. Treatment dosages are optimally titrated to optimize safety and efficacy.

[0375] According to particular embodiments, the compositions described herein are formulated to be suitable for the intended route of administration to a subject. For example, the compositions described herein can be formulated to be suitable for intravenous, subcutaneous, or intramuscular administration.

[0376] As used herein, the terms “treat,” “treating,” and “treatment” are all intended to refer to an amelioration or reversal of at least one measurable physical parameter related to a cancer, which is not necessarily discernible in the subject, but can be discernible in the subject. The terms “treat,” “treating,” and “treatment,” can also refer to causing regression, preventing the progression, or at least slowing down the progression of the disease, disorder, or condition. In a particular embodiment, “treat,” “treating,” and “treatment” refer to an alleviation, prevention of the development or onset, or reduction in the duration of one or more symptoms associated with the disease, disorder, or condition, such as a tumor or more preferably a cancer. In a particular embodiment, “treat,” “treating,” and “treatment” refer to prevention of the recurrence of the disease, disorder, or condition. In a particular embodiment, “treat,” “treating,” and “treatment” refer to an increase in the survival of a subject having the disease, disorder, or condition. In a particular embodiment, “treat,” “treating,” and “treatment” refer to elimination of the disease, disorder, or condition in the subject.

[0377] In some embodiments, a TRGV9 antibody provided herein is used in combination with a supplemental therapy. In some embodiments, a TRDV2 antibody provided herein is used in combination with a supplemental therapy.

[0378] In some embodiments, a TRGDC antibody provided herein is used in combination with a supplemental therapy.

[0379] As used herein, the term “in combination,” in the context of the administration of two or more therapies to a subject, refers to the use of more than one therapy. The use of the term “in combination” does not restrict the order in which therapies are administered to a subject. For example, a first therapy (e.g., a composition described herein) can be administered prior to (e.g., 5 minutes, 15 minutes, 30 minutes, 45 minutes, 1 hour, 2 hours, 4 hours, 6 hours, 12 hours, 16 hours, 24 hours, 48 hours, 72 hours, 96 hours, 1 week, 2 weeks, 3 weeks, 4 weeks, 5 weeks, 6 weeks, 8 weeks, or 12 weeks before), concomitantly with, or subsequent to (e.g., 5 minutes, 15 minutes, 30 minutes, 45 minutes, 1 hour, 2 hours, 4 hours, 6 hours, 12 hours, 16 hours, 24 hours, 48 hours, 72 hours, 96 hours, 1 week, 2 weeks, 3 weeks, 4 weeks, 5 weeks, 6 weeks, 8 weeks, or 12 weeks after) the administration of a second therapy to a subject.

[0380] TRGV9 antibodies provided herein may also be used as agents to detect TRGV9-expressing cells. Thus, in another methods, provided is a method of detecting a cell expressing TRGV9, comprising contacting a cell with a TRGV9 antibody provided herein. In certain embodiments, the detecting is by ELISA. In some embodiments, the detecting is by FACS analysis. Also provided are kits comprising a TRGV9 antibody provided herein, and instructions for use.

[0381] TRDV2 antibodies provided herein may also be used as agents to detect TRDV2-expressing cells. Thus, in another methods, provided is a method of detecting a cell expressing TRDV2, comprising contacting a cell with a TRDV2 antibody provided herein. In certain embodiments, the detecting is by ELISA. In some embodiments, the detecting is by FACS analysis. Also provided are kits comprising a TRDV2 antibody provided herein, and instructions for use.

[0382] TRGDC antibodies provided herein may also be used as agents to detect TRGDC-expressing cells. Thus, in another methods, provided is a method of detecting a cell expressing TRGDC, comprising contacting a cell with a TRGDC antibody provided herein. In certain embodiments, the detecting is by ELISA. In some embodiments, the detecting is by FACS analysis. Also provided are kits comprising a TRGDC antibody provided herein, and instructions for use.

### Enrichment and Detection Methods

[0383] In one aspect, the TRGV9 antibodies provided herein are used as agents to detect TRGV9-expressing cells. Thus, in other methods, provided is a method of detecting a cell expressing TRGV9, comprising contacting a cell with a TRGV9 antibody provided herein. In certain embodiments, the detecting is by ELISA. In some embodiments, the detecting is by FACS analysis. Also provided are kits comprising a TRGV9 antibody provided herein, and instructions for use.

[0384] Enrichment, isolation, separation, purification, sorting, selecting, capturing or detecting, or any combination thereof can be done using known technologies such as bead, microfluidics, solid support, columns, and the like. For example, TRGV9 cells may be separated or visualized using known methods when bound to the TRGV9 antibodies provided herein.

[0385] The TRGV9 antibodies or multispecific TRGV9 antibodies provided herein can be used to selectively enrich, isolate, separate, purify, sort, select, capture or detect TRGV9-expressing cells. The TRGV9 antibodies or multispecific TRGV9 antibodies provided herein may be utilized in a bispecific format, e.g. containing a first antigen binding domain that specifically binds TRGV9 and a second antigen binding domain that specifically binds a second target. In other embodiments, the multispecific TRGV9 antibodies provided herein may be utilized in a format that further incorporates a third antigen binding domain that specifically binds a third antigen (e.g., at a trispecific antibody). In other embodiments, the multispecific TRGV9 antibodies provided herein may be utilized in a format that further incorporates a fourth antigen binding domain that specifically binds a fourth antigen. (e.g., as a quadraspecific antibody).

[0386] In one aspect, provided herein is a method of enriching a TRGV9-expressing cell comprising: providing a sample comprising the TRGV9-expressing cell; contacting the sample with a TRGV9 antibody provided herein; and enriching the TRGV9-expressing cell bound to the TRGV9 antibody. In one aspect, provided herein is a method of isolating a TRGV9-expressing cell comprising: providing a sample comprising the TRGV9-expressing cell; contacting the sample with a TRGV9 antibody provided herein; and isolating the TRGV9-expressing cell bound to the TRGV9 antibody. In one aspect, provided herein is a method of separating a TRGV9-expressing cell comprising: providing a sample comprising the TRGV9-expressing cell; contacting the sample with a TRGV9 antibody provided herein; and separating the TRGV9-expressing cell bound to the TRGV9 antibody. In one aspect, 10 provided herein is a method of purifying a TRGV9-expressing cell comprising: providing a sample comprising the TRGV9-expressing cell; contacting the sample with a TRGV9 antibody provided herein; and purifying the TRGV9-expressing cell bound to the TRGV9 antibody. In one aspect, provided herein is a method of sorting a TRGV9-expressing cell comprising: providing a sample comprising the TRGV9-expressing cell; contacting the sample with a TRGV9 antibody provided herein; and sorting the TRGV9-expressing cell bound to the TRGV9 antibody. In one aspect, provided herein is a method of selecting a TRGV9-expressing cell comprising: providing a sample comprising the TRGV9-expressing cell; contacting the sample with a TRGV9 antibody provided herein; and selecting the TRGV9-expressing cell bound to the TRGV9 antibody. In one aspect, provided herein is a method of capturing a TRGV9-expressing cell comprising: providing a sample comprising the TRGV9-expressing cell; contacting the sample with a TRGV9 antibody provided herein; and capturing the TRGV9-expressing cell bound to the TRGV9 antibody. In one aspect, provided herein is a method of detecting a TRGV9-expressing cell comprising: providing a sample comprising the TRGV9-expressing cell; contacting the sample with a TRGV9 antibody provided herein; and detecting the TRGV9-expressing cell bound to the TRGV9 antibody.

[0387] In one aspect, provided herein is a method of enriching a TRGV9-expressing cell comprising: contacting a TRGV9-expressing cell with a TRGV9 antibody provided herein; and enriching the TRGV9-expressing cell bound to the TRGV9 antibody. In one aspect, provided herein is a method of isolating a TRGV9-expressing cell comprising: contacting a TRGV9-expressing cell with a TRGV9 antibody provided herein; and isolating the TRGV9-expressing cell bound to the TRGV9 antibody. In one aspect, provided herein is a method of separating a TRGV9-expressing cell comprising: contacting a TRGV9-expressing cell with a TRGV9 antibody provided herein; and separating the TRGV9-expressing cell bound to the TRGV9 antibody. In one aspect, provided herein is a method of purifying a TRGV9-expressing cell comprising: contacting a TRGV9-expressing cell with a TRGV9 antibody provided herein; and purifying the TRGV9-expressing cell bound to the TRGV9 antibody. In one aspect, provided herein is a method of sorting a TRGV9-expressing cell comprising: contacting a TRGV9-expressing cell with a TRGV9 antibody provided herein; and sorting the TRGV9-expressing cell bound to the TRGV9 antibody. In one aspect, provided herein is a method of selecting a TRGV9-expressing cell comprising: contacting a TRGV9-expressing cell with a TRGV9 antibody provided herein; and selecting the TRGV9-expressing cell bound to the TRGV9 antibody. In one aspect, provided herein is a method of capturing a TRGV9-expressing cell comprising: contacting a TRGV9-expressing cell with a TRGV9 antibody provided herein; and capturing the TRGV9-expressing cell bound to the TRGV9 antibody. In one aspect, provided herein is a method of detecting a TRGV9-expressing cell comprising: contacting a TRGV9-expressing cell with a TRGV9 antibody provided herein; and detecting the TRGV9-expressing cell bound to the TRGV9 antibody.

[0388] In one aspect, provided herein is a method of enriching a TRGV9-expressing cell comprising: contacting a TRGV9-expressing cell with a TRGV9 antibody provided herein; and enriching the TRGV9-expressing cell based on binding of the TRGV9-expressing cell to the TRGV9 antibody. In one aspect, provided herein is a method of isolating a TRGV9-expressing cell comprising: contacting a TRGV9-expressing cell with a TRGV9 antibody provided herein; and isolating the TRGV9-expressing cell based on binding of the TRGV9-expressing cell to the TRGV9 antibody. In one aspect, provided herein is a method of separating a TRGV9-expressing cell comprising: contacting a TRGV9-expressing cell with a TRGV9 antibody provided herein; and separating the TRGV9-expressing cell based on binding of the TRGV9-expressing cell to the TRGV9 antibody. In one aspect, provided herein is a method of purifying a TRGV9-expressing cell comprising: contacting a TRGV9-expressing cell with a TRGV9 antibody provided herein; and purifying the TRGV9-expressing cell based on binding of the TRGV9-expressing cell to the TRGV9 antibody. In one aspect, provided herein is a method of sorting a TRGV9-expressing cell comprising: contacting a TRGV9-expressing cell with a TRGV9 antibody provided herein; and sorting the TRGV9-expressing cell based on binding of the TRGV9-expressing cell to the TRGV9 antibody. In one aspect, provided herein is a method of selecting a TRGV9-expressing cell comprising: contacting a TRGV9-expressing cell with a TRGV9 antibody provided herein; and selecting the TRGV9-expressing cell based on binding of the TRGV9-expressing cell to the TRGV9 antibody. In one aspect, provided herein is a method of capturing a TRGV9-expressing cell comprising: contacting a TRGV9-expressing cell with a TRGV9 antibody provided herein; and capturing the TRGV9-expressing cell based on binding of the TRGV9-expressing cell to the TRGV9 antibody. In one aspect, provided herein is a method of detecting a TRGV9-expressing cell comprising: contacting a TRGV9-expressing cell with a TRGV9 antibody provided herein; and detecting the TRGV9-expressing cell based on binding of the TRGV9-expressing cell to the TRGV9 antibody.

[0389] In certain embodiments of the methods, the TRGV9-expressing cell is a T cell. In some embodiments of the methods, the TRGV9-expressing cell is in a population of cells. In some embodiments of the methods, the TRGV9-expressing cell is in a population of lymphocytes. In some embodiments of the methods, the TRGV9-expressing cell is in a population of T cells. In some embodiments of the methods, the TRGV9-expressing cell is provided as a population of cells. In some embodiments of the methods, the TRGV9-expressing cell is provided as a population of lymphocytes. In some embodiments of the methods, the TRGV9-expressing cell is provided as a population of T cells. In some embodiments of the methods, the TRGV9-expressing cell is provided as a sample comprising a population of cells. In some embodiments of the methods, the TRGV9-expressing cell is provided as a sample comprising a population of lymphocytes. In some embodiments of the methods, the TRGV9-expressing cell is provided as a sample comprising a population of T cells. In some embodiments of the methods, the sample is a blood sample. In some embodiments of the methods, the sample is a tissue sample. In some embodiments of the methods, the sample is a tissue culture sample.

[0390] In some embodiments of the methods, the TRGV9 antibody is a multispecific TRGV9 antibody provided herein. In some embodiments of the methods, the TRGV9 antibody is a bispecific TRGV9 antibody provided herein. In some embodiments of the methods, the TRGV9 antibody is a trispecific TRGV9 antibody provided herein. In some embodiments of the methods, the TRGV9 antibody is a quadraspecific TRGV9 antibody provided herein. In certain embodiments, the TRGV9 antibody specifically binds to TRGV9. In one embodiment, the multispecific TRGV9 antibody comprises: (a) a first binding domain that binds TRGV9, and (b) a second binding domain that binds to a second target. In one embodiment, the multispecific TRGV9 antibody comprises: (a) a first binding domain that binds TRGV9, and (b) a second binding domain that binds to a second target, and (c) a third binding domain that binds to a third target. In one embodiment, the multispecific TRGV9 antibody comprises: (a) a first binding domain that binds TRGV9, and (b) a second binding domain that binds to a second target, (c) a third binding domain that binds to a third target, and (d) a fourth binding domain that binds to a fourth target. In one embodiment, the multispecific TRGV9 antibody comprises: (a) a first binding domain that specifically binds TRGV9, and (b) a second binding domain that specifically binds to a second target. In one embodiment, the multispecific TRGV9 antibody comprises: (a) a first binding domain that specifically binds TRGV9, and (b) a second binding domain that specifically binds to a second target, and (c) a third binding domain that specifically binds to a third target. In one embodiment, the multispecific TRGV9 antibody comprises: (a) a first binding domain that specifically binds TRGV9, and (b) a second binding domain that specifically binds to a second target, (c) a third binding domain that specifically binds to a third target, and (d) a fourth binding domain that specifically binds to a fourth target.

[0391] In specific embodiments of the methods provided herein, the method uses multi-marker detection. In some embodiments, the multi-marker detection uses a multispecific TRGV9 antibody provided herein. In some embodiments, the multi-marker detection uses a bispecific TRGV9 antibody provided herein. In some embodiments, the multi-marker detection uses a trispecific TRGV9 antibody provided herein. In some embodiments, the multi-marker detection uses a quadraspecific TRGV9 antibody provided herein.

[0392] In certain embodiments of the methods provided herein, the methods are included as steps in a T cell manufacturing process. In certain embodiments, the cells are CAR-T cells. In certain embodiments of the methods provided herein, the methods are included as steps in a T cell modification process.

[0393] In certain embodiments of the methods provided herein, the methods are included as steps in a diagnostic method. In certain embodiments of the methods provided herein, the methods are included as steps in a method to quantify the TRGV9-expressing T cells.

[0394] In certain embodiments of the methods provided herein, the method further comprises expanding the enriched, isolated, separated, purified, sorted, selected, captured or detected TRGV9-expressing cells. In certain embodiments, the expanding is in vitro. In certain embodiments, the expanding is in vivo. In certain embodiments of the methods provided herein, the method further comprises growing the enriched, isolated, separated, purified, sorted, selected, captured or detected TRGV9-expressing cells. In certain embodiments, the growing is in vitro. In certain embodiments, the growing is in vivo. In certain embodiments of the methods provided herein, the method further comprises quantifying the enriched, isolated, separated, purified, sorted, selected, captured or detected TRGV9-expressing cells.

[0395] In one aspect, the TRDV2 antibodies provided herein are used as agents to detect TRDV2-expressing cells. Thus, in other methods, provided is a method of detecting a cell expressing TRDV2, comprising contacting a cell with a TRDV2 antibody provided herein. In certain embodiments, the detecting is by ELISA. In some embodiments, the detecting is by FACS analysis. Also provided are kits comprising a TRDV2 antibody provided herein, and instructions for use.

[0396] Enrichment, isolation, separation, purification, sorting, selecting, capturing or detecting, or any combination thereof can be done using known technologies such as bead, microfluidics, solid support, columns, and the like. For example, TRDV2 cells may be separated or visualized using known methods when bound to the TRDV2 antibodies provided herein.

[0397] The TRDV2 antibodies or multispecific TRDV2 antibodies provided herein can be used to selectively enrich, isolate, separate, purify, sort, select, capture or detect TRDV2-expressing cells. The TRDV2 antibodies or multispecific TRDV2 antibodies provided herein may be utilized in a bispecific format, e.g. containing a first antigen binding domain that specifically binds TRDV2 and a second antigen binding domain that specifically binds a second target. In other embodiments, the multispecific TRDV2 antibodies provided herein may be utilized in a format that further incorporates a third antigen binding domain that specifically binds a third antigen (e.g., at a trispecific antibody). In other embodiments, the multispecific TRDV2 antibodies provided herein may be utilized in a format that further incorporates a fourth antigen binding domain that specifically binds a fourth antigen. (e.g., as a quadraspecific antibody).

[0398] In one aspect, provided herein is a method of enriching a TRDV2-expressing cell comprising: providing a sample comprising the TRDV2-expressing cell; contacting the sample with a TRDV2 antibody provided herein; and enriching the TRDV2-expressing cell bound to the TRDV2 antibody. In one aspect, provided herein is a method of isolating a TRDV2-expressing cell comprising: providing a sample comprising the TRDV2-expressing cell; contacting the sample with a TRDV2 antibody provided herein; and isolating the TRDV2-expressing cell bound to the TRDV2 antibody. In one aspect, provided herein is a method of separating a TRDV2-expressing cell comprising: providing a sample comprising the TRDV2-expressing cell; contacting the sample with a TRDV2 antibody provided herein; and separating the TRDV2-expressing cell bound to the TRDV2 antibody. In one aspect, provided herein is a method of purifying a TRDV2-expressing cell comprising: providing a sample comprising the TRDV2-expressing cell; contacting the sample with a TRDV2 antibody provided herein; and purifying the TRDV2-expressing cell bound to the TRDV2 antibody. In one aspect, provided herein is a method of sorting a TRDV2-expressing cell comprising: providing a sample comprising the TRDV2-expressing cell; contacting the sample with a TRDV2 antibody provided herein; and sorting the TRDV2-expressing cell bound to the TRDV2 antibody. In one aspect, provided herein is a method of selecting a TRDV2-expressing cell comprising: providing a sample comprising the TRDV2-expressing cell; contacting the sample with a TRDV2 antibody provided herein; and selecting the TRDV2-expressing cell bound to the TRDV2 antibody. In one aspect, provided herein is a method of capturing a TRDV2-expressing cell comprising: providing a sample comprising the TRDV2-expressing cell; contacting the sample with a TRDV2 antibody provided herein; and capturing the TRDV2-expressing cell bound to the TRDV2 antibody. In one aspect, provided herein is a method of detecting a TRDV2-expressing cell comprising: providing a sample comprising the TRDV2-expressing cell; contacting the sample with a TRDV2 antibody provided herein; and detecting the TRDV2-expressing cell bound to the TRDV2 antibody.

[0399] In one aspect, provided herein is a method of enriching a TRDV2-expressing cell comprising: contacting a TRDV2-expressing cell with a TRDV2 antibody provided herein; and enriching the TRDV2-expressing cell bound to the TRDV2 antibody. In one aspect, provided herein is a method of isolating a TRDV2-expressing cell comprising: contacting a TRDV2-expressing cell with a TRDV2 antibody provided herein; and isolating the TRDV2-expressing cell bound to the TRDV2 antibody. In one aspect, provided herein is a method of separating a TRDV2-expressing cell comprising: contacting a TRDV2-expressing cell with a TRDV2 antibody provided herein; and separating the TRDV2-expressing cell bound to the TRDV2 antibody. In one aspect, provided herein is a method of purifying a TRDV2-expressing cell comprising: contacting a TRDV2-expressing cell with a TRDV2 antibody provided herein; and purifying the TRDV2-expressing cell bound to the TRDV2 antibody. In one aspect, provided herein is a method of sorting a TRDV2-expressing cell comprising: contacting a TRDV2-expressing cell with a TRDV2 antibody provided herein; and sorting the TRDV2-expressing cell bound to the TRDV2 antibody. In one aspect, provided herein is a method of selecting a TRDV2-expressing cell comprising: contacting a TRDV2-expressing cell with a TRDV2 antibody provided herein; and selecting the TRDV2-expressing cell bound to the TRDV2 antibody. In one aspect, provided herein is a method of capturing a TRDV2-expressing cell comprising: contacting a TRDV2-expressing cell with a TRDV2 antibody provided herein; and capturing the TRDV2-expressing cell bound to the TRDV2 antibody. In one aspect, provided herein is a method of detecting a TRDV2-expressing cell comprising: contacting a TRDV2-expressing cell with a TRDV2 antibody provided herein; and detecting the TRDV2-expressing cell bound to the TRDV2 antibody.

[0400] In one aspect, provided herein is a method of enriching a TRDV2-expressing cell comprising: contacting a TRDV2-expressing cell with a TRDV2 antibody provided herein; and enriching the TRDV2-expressing cell based on binding of the TRDV2-expressing cell to the TRDV2 antibody. In one aspect, provided herein is a method of isolating a TRDV2-expressing cell comprising: contacting a TRDV2-expressing cell with a TRDV2 antibody provided herein; and isolating the TRDV2-expressing cell based on binding of the TRDV2-expressing cell to the TRDV2 antibody. In one aspect, provided herein is a method of separating a TRDV2-expressing cell comprising: contacting a TRDV2-expressing cell with a TRDV2 antibody provided herein; and separating the TRDV2-expressing cell based on binding of the TRDV2-expressing cell to the TRDV2 antibody. In one aspect, provided herein is a method of purifying a TRDV2-expressing cell comprising: contacting a TRDV2-expressing cell with a TRDV2 antibody provided herein; and purifying the TRDV2-expressing cell based on binding of the TRDV2-expressing cell to the TRDV2 antibody. In one aspect, provided herein is a method of sorting a TRDV2-expressing cell comprising: contacting a TRDV2-expressing cell with a TRDV2 antibody provided herein; and sorting the TRDV2-expressing cell based on binding of the TRDV2-expressing cell to the TRDV2 antibody. In one aspect, provided herein is a method of selecting a TRDV2-expressing cell comprising: contacting a TRDV2-expressing cell with a TRDV2 antibody provided herein; and selecting the TRDV2-expressing cell based on binding of the TRDV2-expressing cell to the TRDV2 antibody. In one aspect, provided herein is a method of capturing a TRDV2-expressing cell comprising: contacting a TRDV2-expressing cell with a TRDV2 antibody provided herein; and capturing the TRDV2-expressing cell based on binding of the TRDV2-expressing cell to the TRDV2 antibody. In one aspect, provided herein is a method of detecting a TRDV2-expressing cell comprising: contacting a TRDV2-expressing cell with a TRDV2 antibody provided herein; and detecting the TRDV2-expressing cell based on binding of the TRDV2-expressing cell to the TRDV2 antibody.

[0401] In certain embodiments of the methods, the TRDV2-expressing cell is a T cell. In some embodiments of the methods, the TRDV2-expressing cell is in a population of cells. In some embodiments of the methods, the TRDV2-expressing cell is in a population of lymphocytes. In some embodiments of the methods, the TRDV2-expressing cell is in a population of T cells. In some embodiments of the methods, the TRDV2-expressing cell is provided as a population of cells. In some embodiments of the methods, the TRDV2-expressing cell is provided as a population of lymphocytes. In some embodiments of the methods, the TRDV2-expressing cell is provided as a population of T cells. In some embodiments of the methods, the TRDV2-expressing cell is provided as a sample comprising a population of cells. In some embodiments of the methods, the TRDV2-expressing cell is provided as a sample comprising a population of lymphocytes. In some embodiments of the methods, the TRDV2-expressing cell is provided as a sample comprising a population of T cells. In some embodiments of the methods, the sample is a blood sample. In some embodiments of the methods, the sample is a tissue sample. In some embodiments of the methods, the sample is a tissue culture sample.

[0402] In some embodiments of the methods, the TRDV2 antibody is a multispecific TRDV2 antibody provided herein. In some embodiments of the methods, the TRDV2 antibody is a bispecific TRDV2 antibody provided herein. In some embodiments of the methods, the TRDV2 antibody is a trispecific TRDV2 antibody provided herein. In some embodiments of the methods, the TRDV2 antibody is a quadraspecific TRDV2 antibody provided herein. In certain embodiments, the TRDV2 antibody specifically binds to TRDV2. In one embodiment, the multispecific TRDV2 antibody comprises: (a) a first binding domain that binds TRDV2, and (b) a second binding domain that binds to a second target. In one embodiment, the multispecific TRDV2 antibody comprises: (a) a first binding domain that binds TRDV2, and (b) a second binding domain that binds to a second target, and (c) a third binding domain that binds to a third target. In one embodiment, the multispecific TRDV2 antibody comprises: (a) a first binding domain that binds TRDV2, and (b) a second binding domain that binds to a second target, (c) a third binding domain that binds to a third target, and (d) a fourth binding domain that binds to a fourth target. In one embodiment, the multispecific TRDV2 antibody comprises: (a) a first binding domain that specifically binds TRDV2, and (b) a second binding domain that specifically binds to a second target. In one embodiment, the multispecific TRDV2 antibody comprises: (a) a first binding domain that specifically binds TRDV2, and (b) a second binding domain that specifically binds to a second target, and (c) a third binding domain that specifically binds to a third target. In one embodiment, the multispecific TRDV2 antibody comprises: (a) a first binding domain that specifically binds TRDV2, and (b) a second binding domain that specifically binds to a second target, (c) a third binding domain that specifically binds to a third target, and (d) a fourth binding domain that specifically binds to a fourth target.

[0403] In specific embodiments of the methods provided herein, the method uses multi-marker detection. In some embodiments, the multi-marker detection uses a multispecific TRDV2 antibody provided herein. In some embodiments, the multi-marker detection uses a bispecific TRDV2 antibody provided herein. In some embodiments, the multi-marker detection uses a trispecific TRDV2 antibody provided herein. In some embodiments, the multi-marker detection uses a quadraspecific TRDV2 antibody provided herein.

[0404] In certain embodiments of the methods provided herein, the methods are included as steps in a T cell manufacturing process. In certain embodiments, the cells are CAR-T cells. In certain embodiments of the methods provided herein, the methods are included as steps in a T cell modification process.

[0405] In certain embodiments of the methods provided herein, the methods are included as steps in a diagnostic method. In certain embodiments of the methods provided herein, the methods are included as steps in a method to quantify the TRDV2-expressing T cells.

[0406] In certain embodiments of the methods provided herein, the method further comprises expanding the enriched, isolated, separated, purified, sorted, selected, captured or detected TRDV2-expressing cells. In certain embodiments, the expanding is in vitro. In certain embodiments, the expanding is in vivo. In certain embodiments of the methods provided herein, the method further comprises growing the enriched, isolated, separated, purified, sorted, selected, captured or detected TRDV2-expressing cells. In certain embodiments, the growing is in vitro. In certain embodiments, the growing is in vivo. In certain embodiments of the methods provided herein, the method further comprises quantifying the enriched, isolated, separated, purified, sorted, selected, captured or detected TRDV2-expressing cells.

[0407] In one aspect, the TRGDC antibodies provided herein are used as agents to detect TRGDC-expressing cells. Thus, in other methods, provided is a method of detecting a cell expressing TRGDC, comprising contacting a cell with a TRGDC antibody provided herein. In certain embodiments, the detecting is by ELISA. In some embodiments, the detecting is by FACS analysis. Also provided are kits comprising a TRGDC antibody provided herein, and instructions for use.

[0408] Enrichment, isolation, separation, purification, sorting, selecting, capturing or detecting, or any combination thereof can be done using known technologies such as bead, microfluidics, solid support, columns, and the like. For example, TRGDC cells may be separated or visualized using known methods when bound to the TRGDC antibodies provided herein.

[0409] The TRGDC antibodies or multispecific TRGDC antibodies provided herein can be used to selectively enrich, isolate, separate, purify, sort, select, capture or detect TRGDC-expressing cells. The TRGDC antibodies or multispecific TRGDC antibodies provided herein may be utilized in a bispecific format, e.g. containing a first antigen binding domain that specifically binds TRGDC and a second antigen binding domain that specifically binds a second target. In other embodiments, the multispecific TRGDC antibodies provided herein may be utilized in a format that further incorporates a third antigen binding domain that specifically binds a third antigen (e.g., at a trispecific antibody). In other embodiments, the multispecific TRGDC antibodies provided herein may be utilized in a format that further incorporates a fourth antigen binding domain that specifically binds a fourth antigen. (e.g., as a quadraspecific antibody).

[0410] In one aspect, provided herein is a method of enriching a TRGDC-expressing cell comprising: providing a sample comprising the TRGDC-expressing cell; contacting the sample with a TRGDC antibody provided herein; and enriching the TRGDC-expressing cell bound to the TRGDC antibody. In one aspect, provided herein is a method of isolating a TRGDC-expressing cell comprising: providing a sample comprising the TRGDC-expressing cell; contacting the sample with a TRGDC antibody provided herein; and isolating the TRGDC-expressing cell bound to the TRGDC antibody. In one aspect, provided herein is a method of separating a TRGDC-expressing cell comprising: providing a sample comprising the TRGDC-expressing cell; contacting the sample with a TRGDC antibody provided herein; and separating the TRGDC-expressing cell bound to the TRGDC antibody. In one aspect, provided herein is a method of purifying a TRGDC-expressing cell comprising: providing a sample comprising the TRGDC-expressing cell; contacting the sample with a TRGDC antibody provided herein; and purifying the TRGDC-expressing cell bound to the TRGDC antibody. In one aspect, provided herein is a method of sorting a TRGDC-expressing cell comprising: providing a sample comprising the TRGDC-expressing cell; contacting the sample with a TRGDC antibody provided herein; and sorting the TRGDC-expressing cell bound to the TRGDC antibody. In one aspect, provided herein is a method of selecting a TRGDC-expressing cell comprising: providing a sample comprising the TRGDC-expressing cell; contacting the sample with a TRGDC antibody provided herein; and selecting the TRGDC-expressing cell bound to the TRGDC antibody. In one aspect, provided herein is a method of capturing a TRGDC-expressing cell comprising: providing a sample comprising the TRGDC-expressing cell; contacting the sample with a TRGDC antibody provided herein; and capturing the TRGDC-expressing cell bound to the TRGDC antibody. In one aspect, provided herein is a method of detecting a TRGDC-expressing cell comprising: providing a sample comprising the TRGDC-expressing cell; contacting the sample with a TRGDC antibody provided herein; and detecting the TRGDC-expressing cell bound to the TRGDC antibody.

[0411] In one aspect, provided herein is a method of enriching a TRGDC-expressing cell comprising: contacting a TRGDC-expressing cell with a TRGDC antibody provided herein; and enriching the TRGDC-expressing cell bound to the TRGDC antibody. In one aspect, provided herein is a method of isolating a TRGDC-expressing cell comprising: contacting a TRGDC-expressing cell with a TRGDC antibody provided herein; and isolating the TRGDC-expressing cell bound to the TRGDC antibody. In one aspect, provided herein is a method of separating a TRGDC-expressing cell comprising: contacting a TRGDC-expressing cell with a TRGDC antibody provided herein; and separating the TRGDC-expressing cell bound to the TRGDC antibody. In one aspect, provided herein is a method of purifying a TRGDC-expressing cell comprising: contacting a TRGDC-expressing cell with a TRGDC antibody provided herein; and purifying the TRGDC-expressing cell bound to the TRGDC antibody. In one aspect, provided herein is a method of sorting a TRGDC-expressing cell comprising: contacting a TRGDC-expressing cell with a TRGDC antibody provided herein; and sorting the TRGDC-expressing cell bound to the TRGDC antibody. In one aspect, provided herein is a method of selecting a TRGDC-expressing cell comprising: contacting a TRGDC-expressing cell with a TRGDC antibody provided herein; and selecting the TRGDC-expressing cell bound to the TRGDC antibody. In one aspect, provided herein is a method of capturing a TRGDC-expressing cell comprising: contacting a TRGDC-expressing cell with a TRGDC antibody provided herein; and capturing the TRGDC-expressing cell bound to the TRGDC antibody. In one aspect, provided herein is a method of detecting a TRGDC-expressing cell comprising: contacting a TRGDC-expressing cell with a TRGDC antibody provided herein; and detecting the TRGDC-expressing cell bound to the TRGDC antibody.

[0412] In one aspect, provided herein is a method of enriching a TRGDC-expressing cell comprising: contacting a TRGDC-expressing cell with a TRGDC antibody provided herein; and enriching the TRGDC-expressing cell based on binding of the TRGDC-expressing cell to the TRGDC antibody. In one aspect, provided herein is a method of isolating a TRGDC-expressing cell comprising: contacting a TRGDC-expressing cell with a TRGDC antibody provided herein; and isolating the TRGDC-expressing cell based on binding of the TRGDC-expressing cell to the TRGDC antibody. In one aspect, provided herein is a method of separating a TRGDC-expressing cell comprising: contacting a TRGDC-expressing cell with a TRGDC antibody provided herein; and separating the TRGDC-expressing cell based on binding of the TRGDC-expressing cell to the TRGDC antibody. In one aspect, provided herein is a method of purifying a TRGDC-expressing cell comprising: contacting a TRGDC-expressing cell with a TRGDC antibody provided herein; and purifying the TRGDC-expressing cell based on binding of the TRGDC-expressing cell to the TRGDC antibody. In one aspect, provided herein is a method of sorting a TRGDC-expressing cell comprising: contacting a TRGDC-expressing cell with a TRGDC antibody provided herein; and sorting the TRGDC-expressing cell based on binding of the TRGDC-expressing cell to the TRGDC antibody. In one aspect, provided herein is a method of selecting a TRGDC-expressing cell comprising: contacting a TRGDC-expressing cell with a TRGDC antibody provided herein; and selecting the TRGDC-expressing cell based on binding of the TRGDC-expressing cell to the TRGDC antibody. In one aspect, provided herein is a method of capturing a TRGDC-expressing cell comprising: contacting a TRGDC-expressing cell with a TRGDC antibody provided herein; and capturing the TRGDC-expressing cell based on binding of the TRGDC-expressing cell to the TRGDC antibody. In one aspect, provided herein is a method of detecting a TRGDC-expressing cell comprising: contacting a TRGDC-expressing cell with a TRGDC antibody provided herein; and detecting the TRGDC-expressing cell based on binding of the TRGDC-expressing cell to the TRGDC antibody.

[0413] In certain embodiments of the methods, the TRGDC-expressing cell is a T cell. In some embodiments of the methods, the TRGDC-expressing cell is in a population of cells. In some embodiments of the methods, the TRGDC-expressing cell is in a population of lymphocytes. In some embodiments of the methods, the TRGDC-expressing cell is in a population of T cells. In some embodiments of the methods, the TRGDC-expressing cell is provided as a population of cells. In some embodiments of the methods, the TRGDC-expressing cell is provided as a population of lymphocytes. In some embodiments of the methods, the TRGDC-expressing cell is provided as a population of T cells. In some embodiments of the methods, the TRGDC-expressing cell is provided as a sample comprising a population of cells. In some embodiments of the methods, the TRGDC-expressing cell is provided as a sample comprising a population of lymphocytes. In some embodiments of the methods, the TRGDC-expressing cell is provided as a sample comprising a population of T cells. In some embodiments of the methods, the sample is a blood sample. In some embodiments of the methods, the sample is a tissue sample. In some embodiments of the methods, the sample is a tissue culture sample.

[0414] In some embodiments of the methods, the TRGDC antibody is a multispecific TRGDC antibody provided herein. In some embodiments of the methods, the TRGDC antibody is a bispecific TRGDC antibody provided herein. In some embodiments of the methods, the TRGDC antibody is a trispecific TRGDC antibody provided herein. In some embodiments of the methods, the TRGDC antibody is a quadraspecific TRGDC antibody provided herein. In certain embodiments, the TRGDC antibody specifically binds to TRGDC. In one embodiment, the multispecific TRGDC antibody comprises: (a) a first binding domain that binds TRGDC, and (b) a second binding domain that binds to a second target. In one embodiment, the multispecific TRGDC antibody comprises: (a) a first binding domain that binds TRGDC, and (b) a second binding domain that binds to a second target, and (c) a third binding domain that binds to a third target. In one embodiment, the multispecific TRGDC antibody comprises: (a) a first binding domain that binds TRGDC, and (b) a second binding domain that binds to a second target, (c) a third binding domain that binds to a third target, and (d) a fourth binding domain that binds to a fourth target. In one embodiment, the multispecific TRGDC antibody comprises: (a) a first binding domain that specifically binds TRGDC, and (b) a second binding domain that specifically binds to a second target. In one embodiment, the multispecific TRGDC antibody comprises: (a) a first binding domain that specifically binds TRGDC, and (b) a second binding domain that specifically binds to a second target, and (c) a third binding domain that specifically binds to a third target. In one embodiment, the multispecific TRGDC antibody comprises: (a) a first binding domain that specifically binds TRGDC, and (b) a second binding domain that specifically binds to a second target, (c) a third binding domain that specifically binds to a third target, and (d) a fourth binding domain that specifically binds to a fourth target.

[0415] In specific embodiments of the methods provided herein, the method uses multi-marker detection. In some embodiments, the multi-marker detection uses a multispecific TRGDC antibody provided herein. In some embodiments, the multi-marker detection uses a bispecific TRGDC antibody provided herein. In some embodiments, the multi-marker detection uses a trispecific TRGDC antibody provided herein. In some embodiments, the multi-marker detection uses a quadraspecific TRGDC antibody provided herein.

[0416] In certain embodiments of the methods provided herein, the methods are included as steps in a T cell manufacturing process. In certain embodiments, the cells are CAR-T cells. In certain embodiments of the methods provided herein, the methods are included as steps in a T cell modification process.

[0417] In certain embodiments of the methods provided herein, the methods are included as steps in a diagnostic method. In certain embodiments of the methods provided herein, the methods are included as steps in a method to quantify the TRGDC-expressing T cells.

[0418] In certain embodiments of the methods provided herein, the method further comprises expanding the enriched, isolated, separated, purified, sorted, selected, captured or detected TRGDC-expressing cells. In certain embodiments, the expanding is in vitro. In certain embodiments, the expanding is in vivo. In certain embodiments of the methods provided herein, the method further comprises growing the enriched, isolated, separated, purified, sorted, selected, captured or detected TRGDC-expressing cells. In certain embodiments, the growing is in vitro. In certain embodiments, the growing is in vivo. In certain embodiments of the methods provided herein, the method further comprises quantifying the enriched, isolated, separated, purified, sorted, selected, captured or detected TRGDC-expressing cells.

### Embodiments

[0419] This invention provides the following non-limiting embodiments.

[0420] In one set of embodiments, provided are:
[0421] A1. An antibody that binds T cell receptor (TCR) Vγ9 (TRGV9), comprising:
   [0422] (1) (i) a VH comprising a VH CDR1, a VH CDR2, and a VH CDR3 having an amino acid sequence of a VH CDR1, a VH CDR2, and a VH CDR3, respectively, of a VH having an amino acid sequence of SEQ ID NO:31; and (ii) a VL comprising a VL CDR1, a VL CDR2, and a VL CDR3 having an amino acid sequence of a VL CDR1, a VL CDR2, and a VL CDR3, respectively, of a VL having an amino acid sequence of SEQ ID NO:32;
   [0423] (2) (i) a VH comprising a VH CDR1, a VH CDR2, and a VH CDR3 having an amino acid sequence of a VH CDR1, a VH CDR2, and a VH CDR3, respectively, of a VH having an amino acid sequence of SEQ ID NO:65; and (ii) a VL comprising a VL CDR1, a VL CDR2, and a VL CDR3 having an amino acid sequence of a VL CDR1, a VL CDR2, and a VL CDR3, respectively, of a VL having an amino acid sequence of SEQ ID NO:66;
   [0424] (3) (i) a VH comprising a VH CDR1, a VH CDR2, and a VH CDR3 having an amino acid sequence of a VH CDR1, a VH CDR2, and a VH CDR3, respectively, of a VH having an amino acid sequence of SEQ ID NO:99; and (ii) a VL comprising a VL CDR1, a VL CDR2, and a VL CDR3 having an amino acid sequence of a VL CDR1, a VL CDR2, and a VL CDR3, respectively, of a VL having an amino acid sequence of SEQ ID NO:100;
   [0425] (4) (i) a VH comprising a VH CDR1, a VH CDR2, and a VH CDR3 having an amino acid sequence of a VH CDR1, a VH CDR2, and a VH CDR3, respectively, of a VH having an amino acid sequence of SEQ ID NO:133; and (ii) a VL comprising a VL CDR1, a VL CDR2, and a VL CDR3 having an amino acid sequence of a VL CDR1, a VL CDR2, and a VL CDR3, respectively, of a VL having an amino acid sequence of SEQ ID NO:134;
   [0426] (5) (i) a VH comprising a VH CDR1, a VH CDR2, and a VH CDR3 having an amino acid sequence of a VH CDR1, a VH CDR2, and a VH CDR3, respectively, of a VH having an amino acid sequence of SEQ ID NO:167; and (ii) a VL comprising a VL CDR1, a VL CDR2, and a VL CDR3 having an amino acid sequence of a VL CDR1, a VL CDR2, and a VL CDR3, respectively, of a VL having an amino acid sequence of SEQ ID NO:168;
   [0427] (6) (i) a VH comprising a VH CDR1, a VH CDR2, and a VH CDR3 having an amino acid sequence of a VH CDR1, a VH CDR2, and a VH CDR3, respectively, of a VH having an amino acid sequence of SEQ ID NO:201; and (ii) a VL comprising a VL CDR1, a VL CDR2, and a VL CDR3 having an amino acid sequence of a VL CDR1, a VL CDR2, and a VL CDR3, respectively, of a VL having an amino acid sequence of SEQ ID NO:202;
   [0428] (7) (i) a VH comprising a VH CDR1, a VH CDR2, and a VH CDR3 having an amino acid sequence of a VH CDR1, a VH CDR2, and a VH CDR3, respectively, of a VH having an amino acid sequence of SEQ ID NO:235; and (ii) a VL comprising a VL CDR1, a VL CDR2, and a VL CDR3 having an amino acid sequence of a VL CDR1, a VL CDR2, and a VL CDR3, respectively, of a VL having an amino acid sequence of SEQ ID NO:236;
   [0429] (8) (i) a VH comprising a VH CDR1, a VH CDR2, and a VH CDR3 having an amino acid sequence of a VH CDR1, a VH CDR2, and a VH CDR3, respectively, of a VH having an amino acid sequence of SEQ ID NO:269; and (ii) a VL comprising a VL CDR1, a VL CDR2, and a VL CDR3 having an amino acid sequence of a VL CDR1, a VL CDR2, and a VL CDR3, respectively, of a VL having an amino acid sequence of SEQ ID NO:270;
   [0430] (9) (i) a VH comprising a VH CDR1, a VH CDR2, and a VH CDR3 having an amino acid sequence of a VH CDR1, a VH CDR2, and a VH CDR3, respectively, of a VH having an amino acid sequence of SEQ ID NO:303; and (ii) a VL comprising a VL CDR1, a VL CDR2, and a VL CDR3 having an amino acid sequence of a VL CDR1, a VL CDR2, and a VL CDR3, respectively, of a VL having an amino acid sequence of SEQ ID NO:304;
   [0431] (10) (i) a VH comprising a VH CDR1, a VH CDR2, and a VH CDR3 having an amino acid sequence of a VH CDR1, a VH CDR2, and a VH CDR3, respectively, of a VH having an amino acid sequence of SEQ ID NO:337; and (ii) a VL comprising a VL CDR1, a VL CDR2, and a VL CDR3 having an amino acid sequence of a VL CDR1, a VL CDR2, and a VL CDR3, respectively, of a VL having an amino acid sequence of SEQ ID NO:338;
   [0432] (11) (i) a VH comprising a VH CDR1, a VH CDR2, and a VH CDR3 having an amino acid sequence of a VH CDR1, a VH CDR2, and a VH CDR3, respectively, of a VH having an amino acid sequence of SEQ ID NO:371; and (ii) a VL comprising a VL CDR1, a VL CDR2, and a VL CDR3 having an amino acid sequence of a VL CDR1, a VL CDR2, and a VL CDR3, respectively, of a VL having an amino acid sequence of SEQ ID NO:372;
   [0433] (12) (i) a VH comprising a VH CDR1, a VH CDR2, and a VH CDR3 having an amino acid sequence of a VH CDR1, a VH CDR2, and a VH CDR3, respectively, of a VH having an amino acid sequence of SEQ ID NO:405; and (ii) a VL comprising a VL CDR1, a VL CDR2, and a VL CDR3 having an amino acid sequence of a VL CDR1, a VL CDR2, and a VL CDR3, respectively, of a VL having an amino acid sequence of SEQ ID NO:406;
   [0434] (13) (i) a VH comprising a VH CDR1, a VH CDR2, and a VH CDR3 having an amino acid sequence of a VH CDR1, a VH CDR2, and a VH CDR3, respectively, of a VH having an amino acid sequence of SEQ ID NO:439; and (ii) a VL comprising a VL CDR1, a VL CDR2, and a VL CDR3 having an amino acid sequence of a VL CDR1, a VL CDR2, and a VL CDR3, respectively, of a VL having an amino acid sequence of SEQ ID NO:440;
   [0435] (14) (i) a VH comprising a VH CDR1, a VH CDR2, and a VH CDR3 having an amino acid sequence of a VH CDR1, a VH CDR2, and a VH CDR3, respectively, of a VH having an amino acid sequence of SEQ ID NO:473; and (ii) a VL comprising a VL CDR1, a VL CDR2, and a VL CDR3 having an amino acid sequence of a VL CDR1, a VL CDR2, and a VL CDR3, respectively, of a VL having an amino acid sequence of SEQ ID NO:474;
   [0436] (15) (i) a VH comprising a VH CDR1, a VH CDR2, and a VH CDR3 having an amino acid sequence of a VH CDR1, a VH CDR2, and a VH CDR3, respectively, of a VH having an amino acid sequence of SEQ ID NO:507; and (ii) a VL comprising a VL CDR1, a VL CDR2, and a VL CDR3 having an amino acid sequence of a VL CDR1, a VL CDR2, and a VL CDR3, respectively, of a VL having an amino acid sequence of SEQ ID NO:508;
   [0437] (16) (i) a VH comprising a VH CDR1, a VH CDR2, and a VH CDR3 having an amino acid sequence of a VH CDR1, a VH CDR2, and a VH CDR3, respectively, of a VH having an amino acid sequence of SEQ ID NO:541; and (ii) a VL comprising a VL CDR1, a VL CDR2, and a VL CDR3 having an amino acid sequence of a VL CDR1, a VL CDR2, and a VL CDR3, respectively, of a VL having an amino acid sequence of SEQ ID NO:542;
   [0438] (17) (i) a VH comprising a VH CDR1, a VH CDR2, and a VH CDR3 having an amino acid sequence of a VH CDR1, a VH CDR2, and a VH CDR3, respectively, of a VH having an amino acid sequence of SEQ ID NO:575; and (ii) a VL comprising a VL CDR1, a VL CDR2, and a VL CDR3 having an amino acid sequence of a VL CDR1, a VL CDR2, and a VL CDR3, respectively, of a VL having an amino acid sequence of SEQ ID NO:576;
   [0439] (18) (i) a VH comprising a VH CDR1, a VH CDR2, and a VH CDR3 having an amino acid sequence of a VH CDR1, a VH CDR2, and a VH CDR3, respectively, of a VH having an amino acid sequence of SEQ ID NO:609; and (ii) a VL comprising a VL CDR1, a VL CDR2, and a VL CDR3 having an amino acid sequence of a VL CDR1, a VL CDR2, and a VL CDR3, respectively, of a VL having an amino acid sequence of SEQ ID NO:610;
   [0440] (19) (i) a VH comprising a VH CDR1, a VH CDR2, and a VH CDR3 having an amino acid sequence of a VH CDR1, a VH CDR2, and a VH CDR3, respectively, of a VH having an amino acid sequence of SEQ ID NO:643; and (ii) a VL comprising a VL CDR1, a VL CDR2, and a VL CDR3 having an amino acid sequence of a VL CDR1, a VL CDR2, and a VL CDR3, respectively, of a VL having an amino acid sequence of SEQ ID NO:644;
   [0441] (20) (i) a VH comprising a VH CDR1, a VH CDR2, and a VH CDR3 having an amino acid sequence of a VH CDR1, a VH CDR2, and a VH CDR3, respectively, of a VH having an amino acid sequence of SEQ ID NO:677; and (ii) a VL comprising a VL CDR1, a VL CDR2, and a VL CDR3 having an amino acid sequence of a VL CDR1, a VL CDR2, and a VL CDR3, respectively, of a VL having an amino acid sequence of SEQ ID NO:678;
   [0442] (21) (i) a VH comprising a VH CDR1, a VH CDR2, and a VH CDR3 having an amino acid sequence of a VH CDR1, a VH CDR2, and a VH CDR3, respectively, of a VH having an amino acid sequence of SEQ ID NO:711; and (ii) a VL comprising a VL CDR1, a VL CDR2, and a VL CDR3 having an amino acid sequence of a VL CDR1, a VL CDR2, and a VL CDR3, respectively, of a VL having an amino acid sequence of SEQ ID NO:712;
   [0443] (22) (i) a VH comprising a VH CDR1, a VH CDR2, and a VH CDR3 having an amino acid sequence of a VH CDR1, a VH CDR2, and a VH CDR3, respectively, of a VH having an amino acid sequence of SEQ ID NO:745; and (ii) a VL comprising a VL CDR1, a VL CDR2, and a VL CDR3 having an amino acid sequence of a VL CDR1, a VL CDR2, and a VL CDR3, respectively, of a VL having an amino acid sequence of SEQ ID NO:746;
   [0444] (23) (i) a VH comprising a VH CDR1, a VH CDR2, and a VH CDR3 having an amino acid sequence of a VH CDR1, a VH CDR2, and a VH CDR3, respectively, of a VH having an amino acid sequence of SEQ ID NO:779; and (ii) a VL comprising a VL CDR1, a VL CDR2, and a VL CDR3 having an amino acid sequence of a VL CDR1, a VL CDR2, and a VL CDR3, respectively, of a VL having an amino acid sequence of SEQ ID NO:780;
   [0445] (24) (i) a VH comprising a VH CDR1, a VH CDR2, and a VH CDR3 having an amino acid sequence of a VH CDR1, a VH CDR2, and a VH CDR3, respectively, of a VH having an amino acid sequence of SEQ ID NO:813; and (ii) a VL comprising a VL CDR1, a VL CDR2, and a VL CDR3 having an amino acid sequence of a VL CDR1, a VL CDR2, and a VL CDR3, respectively, of a VL having an amino acid sequence of SEQ ID NO:814;
   [0446] (25) (i) a VH comprising a VH CDR1, a VH CDR2, and a VH CDR3 having an amino acid sequence of a VH CDR1, a VH CDR2, and a VH CDR3, respectively, of a VH having an amino acid sequence of SEQ ID NO:847; and (ii) a VL comprising a VL CDR1, a VL CDR2, and a VL CDR3 having an amino acid sequence of a VL CDR1, a VL CDR2, and a VL CDR3, respectively, of a VL having an amino acid sequence of SEQ ID NO:848;
   [0447] (26) (i) a VH comprising a VH CDR1, a VH CDR2, and a VH CDR3 having an amino acid sequence of a VH CDR1, a VH CDR2, and a VH CDR3, respectively, of a VH having an amino acid sequence of SEQ ID NO:881; and (ii) a VL comprising a VL CDR1, a VL CDR2, and a VL CDR3 having an amino acid sequence of a VL CDR1, a VL CDR2, and a VL CDR3, respectively, of a VL having an amino acid sequence of SEQ ID NO:882;
   [0448] (27) (i) a VH comprising a VH CDR1, a VH CDR2, and a VH CDR3 having an amino acid sequence of a VH CDR1, a VH CDR2, and a VH CDR3, respectively, of a VH having an amino acid sequence of SEQ ID NO:915; and (ii) a VL comprising a VL CDR1, a VL CDR2, and a VL CDR3 having an amino acid sequence of a VL CDR1, a VL CDR2, and a VL CDR3, respectively, of a VL having an amino acid sequence of SEQ ID NO:916;
   [0449] (28) (i) a VH comprising a VH CDR1, a VH CDR2, and a VH CDR3 having an amino acid sequence of a VH CDR1, a VH CDR2, and a VH CDR3, respectively, of a VH having an amino acid sequence of SEQ ID NO:949; and (ii) a VL comprising a VL CDR1, a VL CDR2, and a VL CDR3 having an amino acid sequence of a VL CDR1, a VL CDR2, and a VL CDR3, respectively, of a VL having an amino acid sequence of SEQ ID NO:950;
   [0450] (29) (i) a VH comprising a VH CDR1, a VH CDR2, and a VH CDR3 having an amino acid sequence of a VH CDR1, a VH CDR2, and a VH CDR3, respectively, of a VH having an amino acid sequence of SEQ ID NO:983; and (ii) a VL comprising a VL CDR1, a VL CDR2, and a VL CDR3 having an amino acid sequence of a VL CDR1, a VL CDR2, and a VL CDR3, respectively, of a VL having an amino acid sequence of SEQ ID NO:984;
   [0451] (30) (i) a VH comprising a VH CDR1, a VH CDR2, and a VH CDR3 having an amino acid sequence of a VH CDR1, a VH CDR2, and a VH CDR3, respectively, of a VH having an amino acid sequence of SEQ ID NO:1017; and (ii) a VL comprising a VL CDR1, a VL CDR2, and a VL CDR3 having an amino acid sequence of a VL CDR1, a VL CDR2, and a VL CDR3, respectively, of a VL having an amino acid sequence of SEQ ID NO:1018;
   [0452] (31) (i) a VH comprising a VH CDR1, a VH CDR2, and a VH CDR3 having an amino acid sequence of a VH CDR1, a VH CDR2, and a VH CDR3, respectively, of a VH having an amino acid sequence of SEQ ID NO:1051; and (ii) a VL comprising a VL CDR1, a VL CDR2, and a VL CDR3 having an amino acid sequence of a VL CDR1, a VL CDR2, and a VL CDR3, respectively, of a VL having an amino acid sequence of SEQ ID NO:1052;
   [0453] (32) (i) a VH comprising a VH CDR1, a VH CDR2, and a VH CDR3 having an amino acid sequence of a VH CDR1, a VH CDR2, and a VH CDR3, respectively, of a VH having an amino acid sequence of SEQ ID NO:1085; and (ii) a VL comprising a VL CDR1, a VL CDR2, and a VL CDR3 having an amino acid sequence of a VL CDR1, a VL CDR2, and a VL CDR3, respectively, of a VL having an amino acid sequence of SEQ ID NO:1086;
   [0454] (33) (i) a VH comprising a VH CDR1, a VH CDR2, and a VH CDR3 having an amino acid sequence of a VH CDR1, a VH CDR2, and a VH CDR3, respectively, of a VH having an amino acid sequence of SEQ ID NO:1119; and (ii) a VL comprising a VL CDR1, a VL CDR2, and a VL CDR3 having an amino acid sequence of a VL CDR1, a VL CDR2, and a VL CDR3, respectively, of a VL having an amino acid sequence of SEQ ID NO:1120;
   [0455] (34) (i) a VH comprising a VH CDR1, a VH CDR2, and a VH CDR3 having an amino acid sequence of a VH CDR1, a VH CDR2, and a VH CDR3, respectively, of a VH having an amino acid sequence of SEQ ID NO:1153; and (ii) a VL comprising a VL CDR1, a VL CDR2, and a VL CDR3 having an amino acid sequence of a VL CDR1, a VL CDR2, and a VL CDR3, respectively, of a VL having an amino acid sequence of SEQ ID NO:1154;
   [0456] (35) (i) a VH comprising a VH CDR1, a VH CDR2, and a VH CDR3 having an amino acid sequence of a VH CDR1, a VH CDR2, and a VH CDR3, respectively, of a VH having an amino acid sequence of SEQ ID NO:1187; and (ii) a VL comprising a VL CDR1, a VL CDR2, and a VL CDR3 having an amino acid sequence of a VL CDR1, a VL CDR2, and a VL CDR3, respectively, of a VL having an amino acid sequence of SEQ ID NO:1188;
   [0457] (36) (i) a VH comprising a VH CDR1, a VH CDR2, and a VH CDR3 having an amino acid sequence of a VH CDR1, a VH CDR2, and a VH CDR3, respectively, of a VH having an amino acid sequence of SEQ ID NO:1221; and (ii) a VL comprising a VL CDR1, a VL CDR2, and a VL CDR3 having an amino acid sequence of a VL CDR1, a VL CDR2, and a VL CDR3, respectively, of a VL having an amino acid sequence of SEQ ID NO:1222;
   [0458] (37) (i) a VH comprising a VH CDR1, a VH CDR2, and a VH CDR3 having an amino acid sequence of a VH CDR1, a VH CDR2, and a VH CDR3, respectively, of a VH having an amino acid sequence of SEQ ID NO:1255; and (ii) a VL comprising a VL CDR1, a VL CDR2, and a VL CDR3 having an amino acid sequence of a VL CDR1, a VL CDR2, and a VL CDR3, respectively, of a VL having an amino acid sequence of SEQ ID NO:1256;
   [0459] (38) (i) a VH comprising a VH CDR1, a VH CDR2, and a VH CDR3 having an amino acid sequence of a VH CDR1, a VH CDR2, and a VH CDR3, respectively, of a VH having an amino acid sequence of SEQ ID NO:1289; and (ii) a VL comprising a VL CDR1, a VL CDR2, and a VL CDR3 having an amino acid sequence of a VL CDR1, a VL CDR2, and a VL CDR3, respectively, of a VL having an amino acid sequence of SEQ ID NO:1290;
   [0460] (39) (i) a VH comprising a VH CDR1, a VH CDR2, and a VH CDR3 having an amino acid sequence of a VH CDR1, a VH CDR2, and a VH CDR3, respectively, of a VH having an amino acid sequence of SEQ ID NO:1323; and (ii) a VL comprising a VL CDR1, a VL CDR2, and a VL CDR3 having an amino acid sequence of a VL CDR1, a VL CDR2, and a VL CDR3, respectively, of a VL having an amino acid sequence of SEQ ID NO:1324;
   [0461] (40) (i) a VH comprising a VH CDR1, a VH CDR2, and a VH CDR3 having an amino acid sequence of a VH CDR1, a VH CDR2, and a VH CDR3, respectively, of a VH having an amino acid sequence of SEQ ID NO:1357; and (ii) a VL comprising a VL CDR1, a VL CDR2, and a VL CDR3 having an amino acid sequence of a VL CDR1, a VL CDR2, and a VL CDR3, respectively, of a VL having an amino acid sequence of SEQ ID NO:1358;
   [0462] (41) (i) a VH comprising a VH CDR1, a VH CDR2, and a VH CDR3 having an amino acid sequence of a VH CDR1, a VH CDR2, and a VH CDR3, respectively, of a VH having an amino acid sequence of SEQ ID NO:1391; and (ii) a VL comprising a VL CDR1, a VL CDR2, and a VL CDR3 having an amino acid sequence of a VL CDR1, a VL CDR2, and a VL CDR3, respectively, of a VL having an amino acid sequence of SEQ ID NO:1392;
   [0463] (42) (i) a VH comprising a VH CDR1, a VH CDR2, and a VH CDR3 having an amino acid sequence of a VH CDR1, a VH CDR2, and a VH CDR3, respectively, of a VH having an amino acid sequence of SEQ ID NO:1425; and (ii) a VL comprising a VL CDR1, a VL CDR2, and a VL CDR3 having an amino acid sequence of a VL CDR1, a VL CDR2, and a VL CDR3, respectively, of a VL having an amino acid sequence of SEQ ID NO:1426;
   [0464] (43) (i) a VH comprising a VH CDR1, a VH CDR2, and a VH CDR3 having an amino acid sequence of a VH CDR1, a VH CDR2, and a VH CDR3, respectively, of a VH having an amino acid sequence of SEQ ID NO:1459; and (ii) a VL comprising a VL CDR1, a VL CDR2, and a VL CDR3 having an amino acid sequence of a VL CDR1, a VL CDR2, and a VL CDR3, respectively, of a VL having an amino acid sequence of SEQ ID NO:1460;
   [0465] (44) (i) a VH comprising a VH CDR1, a VH CDR2, and a VH CDR3 having an amino acid sequence of a VH CDR1, a VH CDR2, and a VH CDR3, respectively, of a VH having an amino acid sequence of SEQ ID NO:1493; and (ii) a VL comprising a VL CDR1, a VL CDR2, and a VL CDR3 having an amino acid sequence of a VL CDR1, a VL CDR2, and a VL CDR3, respectively, of a VL having an amino acid sequence of SEQ ID NO:1494;
   [0466] (45) (i) a VH comprising a VH CDR1, a VH CDR2, and a VH CDR3 having an amino acid sequence of a VH CDR1, a VH CDR2, and a VH CDR3, respectively, of a VH having an amino acid sequence of SEQ ID NO:1527; and (ii) a VL comprising a VL CDR1, a VL CDR2, and a VL CDR3 having an amino acid sequence of a VL CDR1, a VL CDR2, and a VL CDR3, respectively, of a VL having an amino acid sequence of SEQ ID NO:1528;
   [0467] (46) (i) a VH comprising a VH CDR1, a VH CDR2, and a VH CDR3 having an amino acid sequence of a VH CDR1, a VH CDR2, and a VH CDR3, respectively, of a VH having an amino acid sequence of SEQ ID NO:1561; and (ii) a VL comprising a VL CDR1, a VL CDR2, and a VL CDR3 having an amino acid sequence of a VL CDR1, a VL CDR2, and a VL CDR3, respectively, of a VL having an amino acid sequence of SEQ ID NO:1562;
   [0468] (47) (i) a VH comprising a VH CDR1, a VH CDR2, and a VH CDR3 having an amino acid sequence of a VH CDR1, a VH CDR2, and a VH CDR3, respectively, of a VH having an amino acid sequence of SEQ ID NO:1595; and (ii) a VL comprising a VL CDR1, a VL CDR2, and a VL CDR3 having an amino acid sequence of a VL CDR1, a VL CDR2, and a VL CDR3, respectively, of a VL having an amino acid sequence of SEQ ID NO:1596;
   [0469] (48) (i) a VH comprising a VH CDR1, a VH CDR2, and a VH CDR3 having an amino acid sequence of a VH CDR1, a VH CDR2, and a VH CDR3, respectively, of a VH having an amino acid sequence of SEQ ID NO:1629; and (ii) a VL comprising a VL CDR1, a VL CDR2, and a VL CDR3 having an amino acid sequence of a VL CDR1, a VL CDR2, and a VL CDR3, respectively, of a VL having an amino acid sequence of SEQ ID NO:1630;
   [0470] (49) (i) a VH comprising a VH CDR1, a VH CDR2, and a VH CDR3 having an amino acid sequence of a VH CDR1, a VH CDR2, and a VH CDR3, respectively, of a VH having an amino acid sequence of SEQ ID NO:1663; and (ii) a VL comprising a VL CDR1, a VL CDR2, and a VL CDR3 having an amino acid sequence of a VL CDR1, a VL CDR2, and a VL CDR3, respectively, of a VL having an amino acid sequence of SEQ ID NO:1664;
   [0471] (50) (i) a VH comprising a VH CDR1, a VH CDR2, and a VH CDR3 having an amino acid sequence of a VH CDR1, a VH CDR2, and a VH CDR3, respectively, of a VH having an amino acid sequence of SEQ ID NO:1697; and (ii) a VL comprising a VL CDR1, a VL CDR2, and a VL CDR3 having an amino acid sequence of a VL CDR1, a VL CDR2, and a VL CDR3, respectively, of a VL having an amino acid sequence of SEQ ID NO:1698;
   [0472] (51) (i) a VH comprising a VH CDR1, a VH CDR2, and a VH CDR3 having an amino acid sequence of a VH CDR1, a VH CDR2, and a VH CDR3, respectively, of a VH having an amino acid sequence of SEQ ID NO:1731; and (ii) a VL comprising a VL CDR1, a VL CDR2, and a VL CDR3 having an amino acid sequence of a VL CDR1, a VL CDR2, and a VL CDR3, respectively, of a VL having an amino acid sequence of SEQ ID NO:1732;
   [0473] (52) (i) a VH comprising a VH CDR1, a VH CDR2, and a VH CDR3 having an amino acid sequence of a VH CDR1, a VH CDR2, and a VH CDR3, respectively, of a VH having an amino acid sequence of SEQ ID NO:1765; and (ii) a VL comprising a VL CDR1, a VL CDR2, and a VL CDR3 having an amino acid sequence of a VL CDR1, a VL CDR2, and a VL CDR3, respectively, of a VL having an amino acid sequence of SEQ ID NO:1766;
   [0474] (53) (i) a VH comprising a VH CDR1, a VH CDR2, and a VH CDR3 having an amino acid sequence of a VH CDR1, a VH CDR2, and a VH CDR3, respectively, of a VH having an amino acid sequence of SEQ ID NO:1799; and (ii) a VL comprising a VL CDR1, a VL CDR2, and a VL CDR3 having an amino acid sequence of a VL CDR1, a VL CDR2, and a VL CDR3, respectively, of a VL having an amino acid sequence of SEQ ID NO:1800;
   [0475] (54) (i) a VH comprising a VH CDR1, a VH CDR2, and a VH CDR3 having an amino acid sequence of a VH CDR1, a VH CDR2, and a VH CDR3, respectively, of a VH having an amino acid sequence of SEQ ID NO:1833; and (ii) a VL comprising a VL CDR1, a VL CDR2, and a VL CDR3 having an amino acid sequence of a VL CDR1, a VL CDR2, and a VL CDR3, respectively, of a VL having an amino acid sequence of SEQ ID NO:1834;
   [0476] (55) (i) a VH comprising a VH CDR1, a VH CDR2, and a VH CDR3 having an amino acid sequence of a VH CDR1, a VH CDR2, and a VH CDR3, respectively, of a VH having an amino acid sequence of SEQ ID NO:1867; and (ii) a VL comprising a VL CDR1, a VL CDR2, and a VL CDR3 having an amino acid sequence of a VL CDR1, a VL CDR2, and a VL CDR3, respectively, of a VL having an amino acid sequence of SEQ ID NO:1868;
   [0477] (56) (i) a VH comprising a VH CDR1, a VH CDR2, and a VH CDR3 having an amino acid sequence of a VH CDR1, a VH CDR2, and a VH CDR3, respectively, of a VH having an amino acid sequence of SEQ ID NO:1901; and (ii) a VL comprising a VL CDR1, a VL CDR2, and a VL CDR3 having an amino acid sequence of a VL CDR1, a VL CDR2, and a VL CDR3, respectively, of a VL having an amino acid sequence of SEQ ID NO:1902;
   [0478] (57) (i) a VH comprising a VH CDR1, a VH CDR2, and a VH CDR3 having an amino acid sequence of a VH CDR1, a VH CDR2, and a VH CDR3, respectively, of a VH having an amino acid sequence of SEQ ID NO:1935; and (ii) a VL comprising a VL CDR1, a VL CDR2, and a VL CDR3 having an amino acid sequence of a VL CDR1, a VL CDR2, and a VL CDR3, respectively, of a VL having an amino acid sequence of SEQ ID NO:1936;
   [0479] (58) (i) a VH comprising a VH CDR1, a VH CDR2, and a VH CDR3 having an amino acid sequence of a VH CDR1, a VH CDR2, and a VH CDR3, respectively, of a VH having an amino acid sequence of SEQ ID NO:1969; and (ii) a VL comprising a VL CDR1, a VL CDR2, and a VL CDR3 having an amino acid sequence of a VL CDR1, a VL CDR2, and a VL CDR3, respectively, of a VL having an amino acid sequence of SEQ ID NO:1970; or
   [0480] (59) (i) a VH comprising a VH CDR1, a VH CDR2, and a VH CDR3 having an amino acid sequence of a VH CDR1, a VH CDR2, and a VH CDR3, respectively, of a VH having an amino acid sequence of SEQ ID NO:2003; and (ii) a VL comprising a VL CDR1, a VL CDR2, and a VL CDR3 having an amino acid sequence of a VL CDR1, a VL CDR2, and a VL CDR3, respectively, of a VL having an amino acid sequence of SEQ ID NO:2004.
[0481] A2. The antibody of embodiment A1, wherein the VH CDR1, VH CDR2, VH CDR3, VL CDR1, VL CDR2, and VL CDR3 amino acid sequences are according to the Kabat numbering system.
[0482] A3. The antibody of embodiment A1, wherein the VH CDR1, VH CDR2, VH CDR3, VL CDR1, VL CDR2, and VL CDR3 amino acid sequences are according to the Chothia numbering system.
[0483] A4. The antibody of embodiment A1, wherein the VH CDR1, VH CDR2, VH CDR3, VL CDR1, VL CDR2, and VL CDR3 amino acid sequences are according to the AbM numbering system.
[0484] A5. The antibody of embodiment A1, wherein the VH CDR1, VH CDR2, VH CDR3, VL CDR1, VL CDR2, and VL CDR3 amino acid sequences are according to the Contact numbering system.
[0485] A6. The antibody of embodiment A1, wherein the VH CDR1, VH CDR2, VH CDR3, VL CDR1, VL CDR2, and VL CDR3 amino acid sequences are according to the IMGT numbering system.
[0486] A7. The antibody of any one of embodiments A1 to A6, wherein the antibody is a humanized antibody.
[0487] A8. The antibody of any one of embodiments A1 to A7, wherein the antibody is an IgG antibody.
[0488] A9. The antibody of embodiment A8, wherein the IgG antibody is an IgG1, IgG2, IgG3, or IgG4 antibody.
[0489] A10. The antibody of any one of embodiments A1 to A9, wherein the antibody comprises a kappa light chain.
[0490] A11. The antibody of any one of embodiments A1 to A9, wherein the antibody comprises a lambda light chain.
[0491] A12. The antibody of any one of embodiments A1 to A11, wherein the antibody is a monoclonal antibody.
[0492] A13. The antibody of any one of embodiments A1 to A12, wherein the antibody binds a TRGV9 antigen.
[0493] A14. The antibody of any one of embodiments A1 to A12, wherein antibody binds a TRGV9 epitope.
[0494] A15. The antibody of any one of embodiments A1 to A14, wherein the antibody specifically binds to TRGV9.
[0495] A16. The antibody of any one of embodiments A1 to A15, wherein the VH CDR1, VH CDR2, VH CDR3, VL CDR1, VL CDR2 and VL CDR3 form a binding site for an antigen of the TRGV9.
[0496] A17. The antibody of any one of embodiments A1 to A15, wherein the VH CDR1, VH CDR2, VH CDR3, VL CDR1, VL CDR2 and VL CDR3 form a binding site for an epitope of the TRGV9.
[0497] A18. The antibody of any one of embodiments A1 to A17, wherein the TRGV9 is present on the surface of a T cell.
[0498] A19. The antibody of any one of embodiments A1 to A18, wherein the antibody is multivalent.
[0499] A20. The antibody of embodiment A19, wherein the antibody is capable of binding at least three antigens.
[0500] A21. The antibody of embodiment A19, wherein the antibody is capable of binding at least five antigens.
[0501] A22. The antibody of any one of embodiments A1 to A21, wherein the antibody is a multispecific antibody.
[0502] A23. The antibody of embodiment A22, wherein the antibody is a bispecific antibody.
[0503] A24. A nucleic acid sequence encoding the antibody of any one of embodiments A1 to A23.
[0504] A25. A vector comprising the nucleic acid sequence of embodiment A24.
[0505] A26. A host cell comprising the vector of embodiment A25.
[0506] A27. A kit comprising the vector of embodiment A25 and packaging for the same.
[0507] A28. A kit comprising the antibody of any one of embodiments A1 to A23 and packaging for the same.
[0508] A29. A pharmaceutical composition comprising the antibody of any one of embodiments A1 to A23, and a pharmaceutically acceptable carrier.
[0509] A30. A method of producing the pharmaceutical composition of embodiment A29, comprising combining the antibody with a pharmaceutically acceptable carrier to obtain the pharmaceutical composition.
[0510] A31. A method of activating a T cell expressing TRGV9, comprising contacting the T cell with the antibody of any one of embodiments A1 to A23.
[0511] A32. The method of embodiment A31, wherein the contacting results in an increase in CD69, CD25, and/or Granzyme B expression, as compared to a control T cell expressing TRGV9.
[0512] B1. An antibody that binds TCR V62 (TRDV2), comprising:
   [0513] (1) (i) a VH comprising a VH CDR1, a VH CDR2, and a VH CDR3 having an amino acid sequence of a VH CDR1, a VH CDR2, and a VH CDR3, respectively, of a VH having an amino acid sequence of SEQ ID NO:2037; and (ii) a VL comprising a VL CDR1, a VL CDR2, and a VL CDR3 having an amino acid sequence of a VL CDR1, a VL CDR2, and a VL CDR3, respectively, of a VL having an amino acid sequence of SEQ ID NO:2038;
   [0514] (2) (i) a VH comprising a VH CDR1, a VH CDR2, and a VH CDR3 having an amino acid sequence of a VH CDR1, a VH CDR2, and a VH CDR3, respectively, of a VH having an amino acid sequence of SEQ ID NO:2071; and (ii) a VL comprising a VL CDR1, a VL CDR2, and a VL CDR3 having an amino acid sequence of a VL CDR1, a VL CDR2, and a VL CDR3, respectively, of a VL having an amino acid sequence of SEQ ID NO:2072;
   [0515] (3) (i) a VH comprising a VH CDR1, a VH CDR2, and a VH CDR3 having an amino acid sequence of a VH CDR1, a VH CDR2, and a VH CDR3, respectively, of a VH having an amino acid sequence of SEQ ID NO:2105; and (ii) a VL comprising a VL CDR1, a VL CDR2, and a VL CDR3 having an amino acid sequence of a VL CDR1, a VL CDR2, and a VL CDR3, respectively, of a VL having an amino acid sequence of SEQ ID NO:2106;
   [0516] (4) (i) a VH comprising a VH CDR1, a VH CDR2, and a VH CDR3 having an amino acid sequence of a VH CDR1, a VH CDR2, and a VH CDR3, respectively, of a VH having an amino acid sequence of SEQ ID NO:2139; and (ii) a VL comprising a VL CDR1, a VL CDR2, and a VL CDR3 having an amino acid sequence of a VL CDR1, a VL CDR2, and a VL CDR3, respectively, of a VL having an amino acid sequence of SEQ ID NO:2140;
   [0517] (5) (i) a VH comprising a VH CDR1, a VH CDR2, and a VH CDR3 having an amino acid sequence of a VH CDR1, a VH CDR2, and a VH CDR3, respectively, of a VH having an amino acid sequence of SEQ ID NO:2173; and (ii) a VL comprising a VL CDR1, a VL CDR2, and a VL CDR3 having an amino acid sequence of a VL CDR1, a VL CDR2, and a VL CDR3, respectively, of a VL having an amino acid sequence of SEQ ID NO:2174;
   [0518] (6) (i) a VH comprising a VH CDR1, a VH CDR2, and a VH CDR3 having an amino acid sequence of a VH CDR1, a VH CDR2, and a VH CDR3, respectively, of a VH having an amino acid sequence of SEQ ID NO:2207; and (ii) a VL comprising a VL CDR1, a VL CDR2, and a VL CDR3 having an amino acid sequence of a VL CDR1, a VL CDR2, and a VL CDR3, respectively, of a VL having an amino acid sequence of SEQ ID NO:2208;
   [0519] (7) (i) a VH comprising a VH CDR1, a VH CDR2, and a VH CDR3 having an amino acid sequence of a VH CDR1, a VH CDR2, and a VH CDR3, respectively, of a VH having an amino acid sequence of SEQ ID NO:2241; and (ii) a VL comprising a VL CDR1, a VL CDR2, and a VL CDR3 having an amino acid sequence of a VL CDR1, a VL CDR2, and a VL CDR3, respectively, of a VL having an amino acid sequence of SEQ ID NO:2242;
   [0520] (8) (i) a VH comprising a VH CDR1, a VH CDR2, and a VH CDR3 having an amino acid sequence of a VH CDR1, a VH CDR2, and a VH CDR3, respectively, of a VH having an amino acid sequence of SEQ ID NO:2275; and (ii) a VL comprising a VL CDR1, a VL CDR2, and a VL CDR3 having an amino acid sequence of a VL CDR1, a VL CDR2, and a VL CDR3, respectively, of a VL having an amino acid sequence of SEQ ID NO:2276;
   [0521] (9) (i) a VH comprising a VH CDR1, a VH CDR2, and a VH CDR3 having an amino acid sequence of a VH CDR1, a VH CDR2, and a VH CDR3, respectively, of a VH having an amino acid sequence of SEQ ID NO:2309; and (ii) a VL comprising a VL CDR1, a VL CDR2, and a VL CDR3 having an amino acid sequence of a VL CDR1, a VL CDR2, and a VL CDR3, respectively, of a VL having an amino acid sequence of SEQ ID NO:2310;
   [0522] (10) (i) a VH comprising a VH CDR1, a VH CDR2, and a VH CDR3 having an amino acid sequence of a VH CDR1, a VH CDR2, and a VH CDR3, respectively, of a VH having an amino acid sequence of SEQ ID NO:2343; and (ii) a VL comprising a VL CDR1, a VL CDR2, and a VL CDR3 having an amino acid sequence of a VL CDR1, a VL CDR2, and a VL CDR3, respectively, of a VL having an amino acid sequence of SEQ ID NO:2344;
   [0523] (11) (i) a VH comprising a VH CDR1, a VH CDR2, and a VH CDR3 having an amino acid sequence of a VH CDR1, a VH CDR2, and a VH CDR3, respectively, of a VH having an amino acid sequence of SEQ ID NO:2377; and (ii) a VL comprising a VL CDR1, a VL CDR2, and a VL CDR3 having an amino acid sequence of a VL CDR1, a VL CDR2, and a VL CDR3, respectively, of a VL having an amino acid sequence of SEQ ID NO:2378;
   [0524] (12) (i) a VH comprising a VH CDR1, a VH CDR2, and a VH CDR3 having an amino acid sequence of a VH CDR1, a VH CDR2, and a VH CDR3, respectively, of a VH having an amino acid sequence of SEQ ID NO:2411; and (ii) a VL comprising a VL CDR1, a VL CDR2, and a VL CDR3 having an amino acid sequence of a VL CDR1, a VL CDR2, and a VL CDR3, respectively, of a VL having an amino acid sequence of SEQ ID NO:2412;
   [0525] (13) (i) a VH comprising a VH CDR1, a VH CDR2, and a VH CDR3 having an amino acid sequence of a VH CDR1, a VH CDR2, and a VH CDR3, respectively, of a VH having an amino acid sequence of SEQ ID NO:2445; and (ii) a VL comprising a VL CDR1, a VL CDR2, and a VL CDR3 having an amino acid sequence of a VL CDR1, a VL CDR2, and a VL CDR3, respectively, of a VL having an amino acid sequence of SEQ ID NO:2446;
   [0526] (14) (i) a VH comprising a VH CDR1, a VH CDR2, and a VH CDR3 having an amino acid sequence of a VH CDR1, a VH CDR2, and a VH CDR3, respectively, of a VH having an amino acid sequence of SEQ ID NO:2479; and (ii) a VL comprising a VL CDR1, a VL CDR2, and a VL CDR3 having an amino acid sequence of a VL CDR1, a VL CDR2, and a VL CDR3, respectively, of a VL having an amino acid sequence of SEQ ID NO:2480;
   [0527] (15) (i) a VH comprising a VH CDR1, a VH CDR2, and a VH CDR3 having an amino acid sequence of a VH CDR1, a VH CDR2, and a VH CDR3, respectively, of a VH having an amino acid sequence of SEQ ID NO:2513; and (ii) a VL comprising a VL CDR1, a VL CDR2, and a VL CDR3 having an amino acid sequence of a VL CDR1, a VL CDR2, and a VL CDR3, respectively, of a VL having an amino acid sequence of SEQ ID NO:2514;
   [0528] (16) (i) a VH comprising a VH CDR1, a VH CDR2, and a VH CDR3 having an amino acid sequence of a VH CDR1, a VH CDR2, and a VH CDR3, respectively, of a VH having an amino acid sequence of SEQ ID NO:2547; and (ii) a VL comprising a VL CDR1, a VL CDR2, and a VL CDR3 having an amino acid sequence of a VL CDR1, a VL CDR2, and a VL CDR3, respectively, of a VL having an amino acid sequence of SEQ ID NO:2548;
   [0529] (17) (i) a VH comprising a VH CDR1, a VH CDR2, and a VH CDR3 having an amino acid sequence of a VH CDR1, a VH CDR2, and a VH CDR3, respectively, of a VH having an amino acid sequence of SEQ ID NO:2581; and (ii) a VL comprising a VL CDR1, a VL CDR2, and a VL CDR3 having an amino acid sequence of a VL CDR1, a VL CDR2, and a VL CDR3, respectively, of a VL having an amino acid sequence of SEQ ID NO:2582;
   [0530] (18) (i) a VH comprising a VH CDR1, a VH CDR2, and a VH CDR3 having an amino acid sequence of a VH CDR1, a VH CDR2, and a VH CDR3, respectively, of a VH having an amino acid sequence of SEQ ID NO:2615; and (ii) a VL comprising a VL CDR1, a VL CDR2, and a VL CDR3 having an amino acid sequence of a VL CDR1, a VL CDR2, and a VL CDR3, respectively, of a VL having an amino acid sequence of SEQ ID NO:2616;
   [0531] (19) (i) a VH comprising a VH CDR1, a VH CDR2, and a VH CDR3 having an amino acid sequence of a VH CDR1, a VH CDR2, and a VH CDR3, respectively, of a VH having an amino acid sequence of SEQ ID NO:2649; and (ii) a VL comprising a VL CDR1, a VL CDR2, and a VL CDR3 having an amino acid sequence of a VL CDR1, a VL CDR2, and a VL CDR3, respectively, of a VL having an amino acid sequence of SEQ ID NO:2650;
   [0532] (20) (i) a VH comprising a VH CDR1, a VH CDR2, and a VH CDR3 having an amino acid sequence of a VH CDR1, a VH CDR2, and a VH CDR3, respectively, of a VH having an amino acid sequence of SEQ ID NO:2683; and (ii) a VL comprising a VL CDR1, a VL CDR2, and a VL CDR3 having an amino acid sequence of a VL CDR1, a VL CDR2, and a VL CDR3, respectively, of a VL having an amino acid sequence of SEQ ID NO:2684;
   [0533] (21) (i) a VH comprising a VH CDR1, a VH CDR2, and a VH CDR3 having an amino acid sequence of a VH CDR1, a VH CDR2, and a VH CDR3, respectively, of a VH having an amino acid sequence of SEQ ID NO:2717; and (ii) a VL comprising a VL CDR1, a VL CDR2, and a VL CDR3 having an amino acid sequence of a VL CDR1, a VL CDR2, and a VL CDR3, respectively, of a VL having an amino acid sequence of SEQ ID NO:2718;
   [0534] (22) (i) a VH comprising a VH CDR1, a VH CDR2, and a VH CDR3 having an amino acid sequence of a VH CDR1, a VH CDR2, and a VH CDR3, respectively, of a VH having an amino acid sequence of SEQ ID NO:2751; and (ii) a VL comprising a VL CDR1, a VL CDR2, and a VL CDR3 having an amino acid sequence of a VL CDR1, a VL CDR2, and a VL CDR3, respectively, of a VL having an amino acid sequence of SEQ ID NO:2752;
   [0535] (23) (i) a VH comprising a VH CDR1, a VH CDR2, and a VH CDR3 having an amino acid sequence of a VH CDR1, a VH CDR2, and a VH CDR3, respectively, of a VH having an amino acid sequence of SEQ ID NO:2785; and (ii) a VL comprising a VL CDR1, a VL CDR2, and a VL CDR3 having an amino acid sequence of a VL CDR1, a VL CDR2, and a VL CDR3, respectively, of a VL having an amino acid sequence of SEQ ID NO:2786;
   [0536] (24) (i) a VH comprising a VH CDR1, a VH CDR2, and a VH CDR3 having an amino acid sequence of a VH CDR1, a VH CDR2, and a VH CDR3, respectively, of a VH having an amino acid sequence of SEQ ID NO:2819; and (ii) a VL comprising a VL CDR1, a VL CDR2, and a VL CDR3 having an amino acid sequence of a VL CDR1, a VL CDR2, and a VL CDR3, respectively, of a VL having an amino acid sequence of SEQ ID NO:2820;
   [0537] (25) (i) a VH comprising a VH CDR1, a VH CDR2, and a VH CDR3 having an amino acid sequence of a VH CDR1, a VH CDR2, and a VH CDR3, respectively, of a VH having an amino acid sequence of SEQ ID NO:2853; and (ii) a VL comprising a VL CDR1, a VL CDR2, and a VL CDR3 having an amino acid sequence of a VL CDR1, a VL CDR2, and a VL CDR3, respectively, of a VL having an amino acid sequence of SEQ ID NO:2854;
   [0538] (26) (i) a VH comprising a VH CDR1, a VH CDR2, and a VH CDR3 having an amino acid sequence of a VH CDR1, a VH CDR2, and a VH CDR3, respectively, of a VH having an amino acid sequence of SEQ ID NO:2887; and (ii) a VL comprising a VL CDR1, a VL CDR2, and a VL CDR3 having an amino acid sequence of a VL CDR1, a VL CDR2, and a VL CDR3, respectively, of a VL having an amino acid sequence of SEQ ID NO:2888;
   [0539] (27) (i) a VH comprising a VH CDR1, a VH CDR2, and a VH CDR3 having an amino acid sequence of a VH CDR1, a VH CDR2, and a VH CDR3, respectively, of a VH having an amino acid sequence of SEQ ID NO:2921; and (ii) a VL comprising a VL CDR1, a VL CDR2, and a VL CDR3 having an amino acid sequence of a VL CDR1, a VL CDR2, and a VL CDR3, respectively, of a VL having an amino acid sequence of SEQ ID NO:2922;
   [0540] (28) (i) a VH comprising a VH CDR1, a VH CDR2, and a VH CDR3 having an amino acid sequence of a VH CDR1, a VH CDR2, and a VH CDR3, respectively, of a VH having an amino acid sequence of SEQ ID NO:2955; and (ii) a VL comprising a VL CDR1, a VL CDR2, and a VL CDR3 having an amino acid sequence of a VL CDR1, a VL CDR2, and a VL CDR3, respectively, of a VL having an amino acid sequence of SEQ ID NO:2956;
   [0541] (29) (i) a VH comprising a VH CDR1, a VH CDR2, and a VH CDR3 having an amino acid sequence of a VH CDR1, a VH CDR2, and a VH CDR3, respectively, of a VH having an amino acid sequence of SEQ ID NO:2989; and (ii) a VL comprising a VL CDR1, a VL CDR2, and a VL CDR3 having an amino acid sequence of a VL CDR1, a VL CDR2, and a VL CDR3, respectively, of a VL having an amino acid sequence of SEQ ID NO:2990;
   [0542] (30) (i) a VH comprising a VH CDR1, a VH CDR2, and a VH CDR3 having an amino acid sequence of a VH CDR1, a VH CDR2, and a VH CDR3, respectively, of a VH having an amino acid sequence of SEQ ID NO:3023; and (ii) a VL comprising a VL CDR1, a VL CDR2, and a VL CDR3 having an amino acid sequence of a VL CDR1, a VL CDR2, and a VL CDR3, respectively, of a VL having an amino acid sequence of SEQ ID NO:3024;
   [0543] (31) (i) a VH comprising a VH CDR1, a VH CDR2, and a VH CDR3 having an amino acid sequence of a VH CDR1, a VH CDR2, and a VH CDR3, respectively, of a VH having an amino acid sequence of SEQ ID NO:3057; and (ii) a VL comprising a VL CDR1, a VL CDR2, and a VL CDR3 having an amino acid sequence of a VL CDR1, a VL CDR2, and a VL CDR3, respectively, of a VL having an amino acid sequence of SEQ ID NO:3058;
   [0544] (32) (i) a VH comprising a VH CDR1, a VH CDR2, and a VH CDR3 having an amino acid sequence of a VH CDR1, a VH CDR2, and a VH CDR3, respectively, of a VH having an amino acid sequence of SEQ ID NO:3091; and (ii) a VL comprising a VL CDR1, a VL CDR2, and a VL CDR3 having an amino acid sequence of a VL CDR1, a VL CDR2, and a VL CDR3, respectively, of a VL having an amino acid sequence of SEQ ID NO:3092;
   [0545] (33) (i) a VH comprising a VH CDR1, a VH CDR2, and a VH CDR3 having an amino acid sequence of a VH CDR1, a VH CDR2, and a VH CDR3, respectively, of a VH having an amino acid sequence of SEQ ID NO:3125; and (ii) a VL comprising a VL CDR1, a VL CDR2, and a VL CDR3 having an amino acid sequence of a VL CDR1, a VL CDR2, and a VL CDR3, respectively, of a VL having an amino acid sequence of SEQ ID NO:3126;
   [0546] (34) (i) a VH comprising a VH CDR1, a VH CDR2, and a VH CDR3 having an amino acid sequence of a VH CDR1, a VH CDR2, and a VH CDR3, respectively, of a VH having an amino acid sequence of SEQ ID NO:3159; and (ii) a VL comprising a VL CDR1, a VL CDR2, and a VL CDR3 having an amino acid sequence of a VL CDR1, a VL CDR2, and a VL CDR3, respectively, of a VL having an amino acid sequence of SEQ ID NO:3160;
   [0547] (35) (i) a VH comprising a VH CDR1, a VH CDR2, and a VH CDR3 having an amino acid sequence of a VH CDR1, a VH CDR2, and a VH CDR3, respectively, of a VH having an amino acid sequence of SEQ ID NO:3193; and (ii) a VL comprising a VL CDR1, a VL CDR2, and a VL CDR3 having an amino acid sequence of a VL CDR1, a VL CDR2, and a VL CDR3, respectively, of a VL having an amino acid sequence of SEQ ID NO:3194;
   [0548] (36) (i) a VH comprising a VH CDR1, a VH CDR2, and a VH CDR3 having an amino acid sequence of a VH CDR1, a VH CDR2, and a VH CDR3, respectively, of a VH having an amino acid sequence of SEQ ID NO:3227; and (ii) a VL comprising a VL CDR1, a VL CDR2, and a VL CDR3 having an amino acid sequence of a VL CDR1, a VL CDR2, and a VL CDR3, respectively, of a VL having an amino acid sequence of SEQ ID NO:3228;
   [0549] (37) (i) a VH comprising a VH CDR1, a VH CDR2, and a VH CDR3 having an amino acid sequence of a VH CDR1, a VH CDR2, and a VH CDR3, respectively, of a VH having an amino acid sequence of SEQ ID NO:3261; and (ii) a VL comprising a VL CDR1, a VL CDR2, and a VL CDR3 having an amino acid sequence of a VL CDR1, a VL CDR2, and a VL CDR3, respectively, of a VL having an amino acid sequence of SEQ ID NO:3262;
   [0550] (38) (i) a VH comprising a VH CDR1, a VH CDR2, and a VH CDR3 having an amino acid sequence of a VH CDR1, a VH CDR2, and a VH CDR3, respectively, of a VH having an amino acid sequence of SEQ ID NO:3295; and (ii) a VL comprising a VL CDR1, a VL CDR2, and a VL CDR3 having an amino acid sequence of a VL CDR1, a VL CDR2, and a VL CDR3, respectively, of a VL having an amino acid sequence of SEQ ID NO:3296;
   [0551] (39) (i) a VH comprising a VH CDR1, a VH CDR2, and a VH CDR3 having an amino acid sequence of a VH CDR1, a VH CDR2, and a VH CDR3, respectively, of a VH having an amino acid sequence of SEQ ID NO:3329; and (ii) a VL comprising a VL CDR1, a VL CDR2, and a VL CDR3 having an amino acid sequence of a VL CDR1, a VL CDR2, and a VL CDR3, respectively, of a VL having an amino acid sequence of SEQ ID NO:3330;
   [0552] (40) (i) a VH comprising a VH CDR1, a VH CDR2, and a VH CDR3 having an amino acid sequence of a VH CDR1, a VH CDR2, and a VH CDR3, respectively, of a VH having an amino acid sequence of SEQ ID NO:3363; and (ii) a VL comprising a VL CDR1, a VL CDR2, and a VL CDR3 having an amino acid sequence of a VL CDR1, a VL CDR2, and a VL CDR3, respectively, of a VL having an amino acid sequence of SEQ ID NO:3364;
   [0553] (41) (i) a VH comprising a VH CDR1, a VH CDR2, and a VH CDR3 having an amino acid sequence of a VH CDR1, a VH CDR2, and a VH CDR3, respectively, of a VH having an amino acid sequence of SEQ ID NO:3397; and (ii) a VL comprising a VL CDR1, a VL CDR2, and a VL CDR3 having an amino acid sequence of a VL CDR1, a VL CDR2, and a VL CDR3, respectively, of a VL having an amino acid sequence of SEQ ID NO:3398;
   [0554] (42) (i) a VH comprising a VH CDR1, a VH CDR2, and a VH CDR3 having an amino acid sequence of a VH CDR1, a VH CDR2, and a VH CDR3, respectively, of a VH having an amino acid sequence of SEQ ID NO:3431; and (ii) a VL comprising a VL CDR1, a VL CDR2, and a VL CDR3 having an amino acid sequence of a VL CDR1, a VL CDR2, and a VL CDR3, respectively, of a VL having an amino acid sequence of SEQ ID NO:3432;
   [0555] (43) (i) a VH comprising a VH CDR1, a VH CDR2, and a VH CDR3 having an amino acid sequence of a VH CDR1, a VH CDR2, and a VH CDR3, respectively, of a VH having an amino acid sequence of SEQ ID NO:3465; and (ii) a VL comprising a VL CDR1, a VL CDR2, and a VL CDR3 having an amino acid sequence of a VL CDR1, a VL CDR2, and a VL CDR3, respectively, of a VL having an amino acid sequence of SEQ ID NO:3466;
   [0556] (44) (i) a VH comprising a VH CDR1, a VH CDR2, and a VH CDR3 having an amino acid sequence of a VH CDR1, a VH CDR2, and a VH CDR3, respectively, of a VH having an amino acid sequence of SEQ ID NO:3499; and (ii) a VL comprising a VL CDR1, a VL CDR2, and a VL CDR3 having an amino acid sequence of a VL CDR1, a VL CDR2, and a VL CDR3, respectively, of a VL having an amino acid sequence of SEQ ID NO:3500;
   [0557] (45) (i) a VH comprising a VH CDR1, a VH CDR2, and a VH CDR3 having an amino acid sequence of a VH CDR1, a VH CDR2, and a VH CDR3, respectively, of a VH having an amino acid sequence of SEQ ID NO:3533; and (ii) a VL comprising a VL CDR1, a VL CDR2, and a VL CDR3 having an amino acid sequence of a VL CDR1, a VL CDR2, and a VL CDR3, respectively, of a VL having an amino acid sequence of SEQ ID NO:3534;
   [0558] (46) (i) a VH comprising a VH CDR1, a VH CDR2, and a VH CDR3 having an amino acid sequence of a VH CDR1, a VH CDR2, and a VH CDR3, respectively, of a VH having an amino acid sequence of SEQ ID NO:3567; and (ii) a VL comprising a VL CDR1, a VL CDR2, and a VL CDR3 having an amino acid sequence of a VL CDR1, a VL CDR2, and a VL CDR3, respectively, of a VL having an amino acid sequence of SEQ ID NO:3568;
   [0559] (47) (i) a VH comprising a VH CDR1, a VH CDR2, and a VH CDR3 having an amino acid sequence of a VH CDR1, a VH CDR2, and a VH CDR3, respectively, of a VH having an amino acid sequence of SEQ ID NO:3601; and (ii) a VL comprising a VL CDR1, a VL CDR2, and a VL CDR3 having an amino acid sequence of a VL CDR1, a VL CDR2, and a VL CDR3, respectively, of a VL having an amino acid sequence of SEQ ID NO:3602;
   [0560] (48) (i) a VH comprising a VH CDR1, a VH CDR2, and a VH CDR3 having an amino acid sequence of a VH CDR1, a VH CDR2, and a VH CDR3, respectively, of a VH having an amino acid sequence of SEQ ID NO:3635; and (ii) a VL comprising a VL CDR1, a VL CDR2, and a VL CDR3 having an amino acid sequence of a VL CDR1, a VL CDR2, and a VL CDR3, respectively, of a VL having an amino acid sequence of SEQ ID NO:3636;
   [0561] (49) (i) a VH comprising a VH CDR1, a VH CDR2, and a VH CDR3 having an amino acid sequence of a VH CDR1, a VH CDR2, and a VH CDR3, respectively, of a VH having an amino acid sequence of SEQ ID NO:3669; and (ii) a VL comprising a VL CDR1, a VL CDR2, and a VL CDR3 having an amino acid sequence of a VL CDR1, a VL CDR2, and a VL CDR3, respectively, of a VL having an amino acid sequence of SEQ ID NO:3670;
   [0562] (50) (i) a VH comprising a VH CDR1, a VH CDR2, and a VH CDR3 having an amino acid sequence of a VH CDR1, a VH CDR2, and a VH CDR3, respectively, of a VH having an amino acid sequence of SEQ ID NO:3703; and (ii) a VL comprising a VL CDR1, a VL CDR2, and a VL CDR3 having an amino acid sequence of a VL CDR1, a VL CDR2, and a VL CDR3, respectively, of a VL having an amino acid sequence of SEQ ID NO:3704;
   [0563] (51) (i) a VH comprising a VH CDR1, a VH CDR2, and a VH CDR3 having an amino acid sequence of a VH CDR1, a VH CDR2, and a VH CDR3, respectively, of a VH having an amino acid sequence of SEQ ID NO:3737; and (ii) a VL comprising a VL CDR1, a VL CDR2, and a VL CDR3 having an amino acid sequence of a VL CDR1, a VL CDR2, and a VL CDR3, respectively, of a VL having an amino acid sequence of SEQ ID NO:3738;
   [0564] (52) (i) a VH comprising a VH CDR1, a VH CDR2, and a VH CDR3 having an amino acid sequence of a VH CDR1, a VH CDR2, and a VH CDR3, respectively, of a VH having an amino acid sequence of SEQ ID NO:3771; and (ii) a VL comprising a VL CDR1, a VL CDR2, and a VL CDR3 having an amino acid sequence of a VL CDR1, a VL CDR2, and a VL CDR3, respectively, of a VL having an amino acid sequence of SEQ ID NO:3772;
   [0565] (53) (i) a VH comprising a VH CDR1, a VH CDR2, and a VH CDR3 having an amino acid sequence of a VH CDR1, a VH CDR2, and a VH CDR3, respectively, of a VH having an amino acid sequence of SEQ ID NO:3805; and (ii) a VL comprising a VL CDR1, a VL CDR2, and a VL CDR3 having an amino acid sequence of a VL CDR1, a VL CDR2, and a VL CDR3, respectively, of a VL having an amino acid sequence of SEQ ID NO:3806;
   [0566] (54) (i) a VH comprising a VH CDR1, a VH CDR2, and a VH CDR3 having an amino acid sequence of a VH CDR1, a VH CDR2, and a VH CDR3, respectively, of a VH having an amino acid sequence of SEQ ID NO:3839; and (ii) a VL comprising a VL CDR1, a VL CDR2, and a VL CDR3 having an amino acid sequence of a VL CDR1, a VL CDR2, and a VL CDR3, respectively, of a VL having an amino acid sequence of SEQ ID NO:3840;
   [0567] (55) (i) a VH comprising a VH CDR1, a VH CDR2, and a VH CDR3 having an amino acid sequence of a VH CDR1, a VH CDR2, and a VH CDR3, respectively, of a VH having an amino acid sequence of SEQ ID NO:3873; and (ii) a VL comprising a VL CDR1, a VL CDR2, and a VL CDR3 having an amino acid sequence of a VL CDR1, a VL CDR2, and a VL CDR3, respectively, of a VL having an amino acid sequence of SEQ ID NO:3874;
   [0568] (56) (i) a VH comprising a VH CDR1, a VH CDR2, and a VH CDR3 having an amino acid sequence of a VH CDR1, a VH CDR2, and a VH CDR3, respectively, of a VH having an amino acid sequence of SEQ ID NO:3907; and (ii) a VL comprising a VL CDR1, a VL CDR2, and a VL CDR3 having an amino acid sequence of a VL CDR1, a VL CDR2, and a VL CDR3, respectively, of a VL having an amino acid sequence of SEQ ID NO:3908;
   [0569] (57) (i) a VH comprising a VH CDR1, a VH CDR2, and a VH CDR3 having an amino acid sequence of a VH CDR1, a VH CDR2, and a VH CDR3, respectively, of a VH having an amino acid sequence of SEQ ID NO:3941; and (ii) a VL comprising a VL CDR1, a VL CDR2, and a VL CDR3 having an amino acid sequence of a VL CDR1, a VL CDR2, and a VL CDR3, respectively, of a VL having an amino acid sequence of SEQ ID NO:3942;
   [0570] (58) (i) a VH comprising a VH CDR1, a VH CDR2, and a VH CDR3 having an amino acid sequence of a VH CDR1, a VH CDR2, and a VH CDR3, respectively, of a VH having an amino acid sequence of SEQ ID NO:3975; and (ii) a VL comprising a VL CDR1, a VL CDR2, and a VL CDR3 having an amino acid sequence of a VL CDR1, a VL CDR2, and a VL CDR3, respectively, of a VL having an amino acid sequence of SEQ ID NO:3976;
   [0571] (59) (i) a VH comprising a VH CDR1, a VH CDR2, and a VH CDR3 having an amino acid sequence of a VH CDR1, a VH CDR2, and a VH CDR3, respectively, of a VH having an amino acid sequence of SEQ ID NO:4009; and (ii) a VL comprising a VL CDR1, a VL CDR2, and a VL CDR3 having an amino acid sequence of a VL CDR1, a VL CDR2, and a VL CDR3, respectively, of a VL having an amino acid sequence of SEQ ID NO:4010;
   [0572] (60) (i) a VH comprising a VH CDR1, a VH CDR2, and a VH CDR3 having an amino acid sequence of a VH CDR1, a VH CDR2, and a VH CDR3, respectively, of a VH having an amino acid sequence of SEQ ID NO:4043; and (ii) a VL comprising a VL CDR1, a VL CDR2, and a VL CDR3 having an amino acid sequence of a VL CDR1, a VL CDR2, and a VL CDR3, respectively, of a VL having an amino acid sequence of SEQ ID NO:4044;
   [0573] (61) (i) a VH comprising a VH CDR1, a VH CDR2, and a VH CDR3 having an amino acid sequence of a VH CDR1, a VH CDR2, and a VH CDR3, respectively, of a VH having an amino acid sequence of SEQ ID NO:4077; and (ii) a VL comprising a VL CDR1, a VL CDR2, and a VL CDR3 having an amino acid sequence of a VL CDR1, a VL CDR2, and a VL CDR3, respectively, of a VL having an amino acid sequence of SEQ ID NO:4078; or
   [0574] (62) (i) a VH comprising a VH CDR1, a VH CDR2, and a VH CDR3 having an amino acid sequence of a VH CDR1, a VH CDR2, and a VH CDR3, respectively, of a VH having an amino acid sequence of SEQ ID NO:4111; and (ii) a VL comprising a VL CDR1, a VL CDR2, and a VL CDR3 having an amino acid sequence of a VL CDR1, a VL CDR2, and a VL CDR3, respectively, of a VL having an amino acid sequence of SEQ ID NO:4112.
[0575] B2. The antibody of embodiment B1, wherein the VH CDR1, VH CDR2, VH CDR3, VL CDR1, VL CDR2, and VL CDR3 amino acid sequences are according to the Kabat numbering system.
[0576] B3. The antibody of embodiment B1, wherein the VH CDR1, VH CDR2, VH CDR3, VL CDR1, VL CDR2, and VL CDR3 amino acid sequences are according to the Chothia numbering system.
[0577] B4. The antibody of embodiment B1, wherein the VH CDR1, VH CDR2, VH CDR3, VL CDR1, VL CDR2, and VL CDR3 amino acid sequences are according to the AbM numbering system.
[0578] B5. The antibody of embodiment B1, wherein the VH CDR1, VH CDR2, VH CDR3, VL CDR1, VL CDR2, and VL CDR3 amino acid sequences are according to the Contact numbering system.
[0579] B6. The antibody of embodiment B1, wherein the VH CDR1, VH CDR2, VH CDR3, VL CDR1, VL CDR2, and VL CDR3 amino acid sequences are according to the IMGT numbering system.
[0580] B7. The antibody of any one of embodiments B1 to B6, wherein the antibody is a humanized antibody.
[0581] B8. The antibody of any one of embodiments B1 to B7, wherein the antibody is an IgG antibody.
[0582] B9. The antibody of embodiment B8, wherein the IgG antibody is an IgG1, IgG2, IgG3, or IgG4 antibody.
[0583] B10. The antibody of any one of embodiments B1 to B9, wherein the antibody comprises a kappa light chain.
[0584] B11. The antibody of any one of embodiments B1 to B9, wherein the antibody comprises a lambda light chain.
[0585] B12. The antibody of any one of embodiments B1 to B11, wherein the antibody is a monoclonal antibody.
[0586] B13. The antibody of any one of embodiments B1 to B12, wherein the antibody binds a TRDV2 antigen.
[0587] B14. The antibody of any one of embodiments B1 to B12, wherein antibody binds a TRDV2 epitope.
[0588] B15. The antibody of any one of embodiments B1 to B14, wherein the antibody specifically binds to TRDV2.
[0589] B16. The antibody of any one of embodiments B1 to B15, wherein the VH CDR1, VH CDR2, VH CDR3, VL CDR1, VL CDR2 and VL CDR3 form a binding site for an antigen of the TRDV2.
[0590] B17. The antibody of any one of embodiments B1 to B15, wherein the VH CDR1, VH CDR2, VH CDR3, VL CDR1, VL CDR2 and VL CDR3 form a binding site for an epitope of the TRDV2.
[0591] B18. The antibody of any one of embodiments B1 to B17, wherein the TRDV2 is present on the surface of a T cell.
[0592] B19. The antibody of any one of embodiments B1 to B18, wherein the antibody is multivalent.
[0593] B20. The antibody of embodiment B19, wherein the antibody is capable of binding at least three antigens.
[0594] B21. The antibody of embodiment B19, wherein the antibody is capable of binding at least five antigens.
[0595] B22. The antibody of any one of embodiments B1 to B21, wherein the antibody is a multispecific antibody.
[0596] B23. The antibody of embodiment B22, wherein the antibody is a bispecific antibody.
[0597] B24. A nucleic acid sequence encoding the antibody of any one of embodiments B1 to B23.
[0598] B25. A vector comprising the nucleic acid sequence of embodiment B24.
[0599] B26. A host cell comprising the vector of embodiment B25.
[0600] B27. A kit comprising the vector of embodiment B25 and packaging for the same.
[0601] B28. A kit comprising the antibody of any one of embodiments B1 to B23 and packaging for the same.
[0602] B29. A pharmaceutical composition comprising the antibody of any one of embodiments B1 to B23, and a pharmaceutically acceptable carrier.
[0603] B30. A method of producing the pharmaceutical composition of embodiment B29, comprising combining the antibody with a pharmaceutically acceptable carrier to obtain the pharmaceutical composition.
[0604] B31. A method of activating a T cell expressing TRDV2, comprising contacting the T cell with the antibody of any one of embodiments B1 to B23.
[0605] B32. The method of embodiment B31, wherein the contacting results in an increase in CD69, CD25, and/or Granzyme B expression, as compared to a control T cell expressing TRDV2.
[0606] C1. An antibody that binds TCR gamma delta constant region (TRGDC), comprising:
   [0607] (1) (i) a VH comprising a VH CDR1, a VH CDR2, and a VH CDR3 having an amino acid sequence of a VH CDR1, a VH CDR2, and a VH CDR3, respectively, of a VH having an amino acid sequence of SEQ ID NO:4145; and (ii) a VL comprising a VL CDR1, a VL CDR2, and a VL CDR3 having an amino acid sequence of a VL CDR1, a VL CDR2, and a VL CDR3, respectively, of a VL having an amino acid sequence of SEQ ID NO:4146;
   [0608] (2) (i) a VH comprising a VH CDR1, a VH CDR2, and a VH CDR3 having an amino acid sequence of a VH CDR1, a VH CDR2, and a VH CDR3, respectively, of a VH having an amino acid sequence of SEQ ID NO:4179; and (ii) a VL comprising a VL CDR1, a VL CDR2, and a VL CDR3 having an amino acid sequence of a VL CDR1, a VL CDR2, and a VL CDR3, respectively, of a VL having an amino acid sequence of SEQ ID NO:4180;
   [0609] (3) (i) a VH comprising a VH CDR1, a VH CDR2, and a VH CDR3 having an amino acid sequence of a VH CDR1, a VH CDR2, and a VH CDR3, respectively, of a VH having an amino acid sequence of SEQ ID NO:4213; and (ii) a VL comprising a VL CDR1, a VL CDR2, and a VL CDR3 having an amino acid sequence of a VL CDR1, a VL CDR2, and a VL CDR3, respectively, of a VL having an amino acid sequence of SEQ ID NO:4214;
   [0610] (4) (i) a VH comprising a VH CDR1, a VH CDR2, and a VH CDR3 having an amino acid sequence of a VH CDR1, a VH CDR2, and a VH CDR3, respectively, of a VH having an amino acid sequence of SEQ ID NO:4247; and (ii) a VL comprising a VL CDR1, a VL CDR2, and a VL CDR3 having an amino acid sequence of a VL CDR1, a VL CDR2, and a VL CDR3, respectively, of a VL having an amino acid sequence of SEQ ID NO:4248;
   [0611] (5) (i) a VH comprising a VH CDR1, a VH CDR2, and a VH CDR3 having an amino acid sequence of a VH CDR1, a VH CDR2, and a VH CDR3, respectively, of a VH having an amino acid sequence of SEQ ID NO:4281; and (ii) a VL comprising a VL CDR1, a VL CDR2, and a VL CDR3 having an amino acid sequence of a VL CDR1, a VL CDR2, and a VL CDR3, respectively, of a VL having an amino acid sequence of SEQ ID NO:4282;
   [0612] (6) (i) a VH comprising a VH CDR1, a VH CDR2, and a VH CDR3 having an amino acid sequence of a VH CDR1, a VH CDR2, and a VH CDR3, respectively, of a VH having an amino acid sequence of SEQ ID NO:4315; and (ii) a VL comprising a VL CDR1, a VL CDR2, and a VL CDR3 having an amino acid sequence of a VL CDR1, a VL CDR2, and a VL CDR3, respectively, of a VL having an amino acid sequence of SEQ ID NO:4316;
   [0613] (7) (i) a VH comprising a VH CDR1, a VH CDR2, and a VH CDR3 having an amino acid sequence of a VH CDR1, a VH CDR2, and a VH CDR3, respectively, of a VH having an amino acid sequence of SEQ ID NO:4349; and (ii) a VL comprising a VL CDR1, a VL CDR2, and a VL CDR3 having an amino acid sequence of a VL CDR1, a VL CDR2, and a VL CDR3, respectively, of a VL having an amino acid sequence of SEQ ID NO:4350;
   [0614] (8) (i) a VH comprising a VH CDR1, a VH CDR2, and a VH CDR3 having an amino acid sequence of a VH CDR1, a VH CDR2, and a VH CDR3, respectively, of a VH having an amino acid sequence of SEQ ID NO:4383; and (ii) a VL comprising a VL CDR1, a VL CDR2, and a VL CDR3 having an amino acid sequence of a VL CDR1, a VL CDR2, and a VL CDR3, respectively, of a VL having an amino acid sequence of SEQ ID NO:4384;
   [0615] (9) (i) a VH comprising a VH CDR1, a VH CDR2, and a VH CDR3 having an amino acid sequence of a VH CDR1, a VH CDR2, and a VH CDR3, respectively, of a VH having an amino acid sequence of SEQ ID NO:4417; and (ii) a VL comprising a VL CDR1, a VL CDR2, and a VL CDR3 having an amino acid sequence of a VL CDR1, a VL CDR2, and a VL CDR3, respectively, of a VL having an amino acid sequence of SEQ ID NO:4418;
   [0616] (10) (i) a VH comprising a VH CDR1, a VH CDR2, and a VH CDR3 having an amino acid sequence of a VH CDR1, a VH CDR2, and a VH CDR3, respectively, of a VH having an amino acid sequence of SEQ ID NO:4451; and (ii) a VL comprising a VL CDR1, a VL CDR2, and a VL CDR3 having an amino acid sequence of a VL CDR1, a VL CDR2, and a VL CDR3, respectively, of a VL having an amino acid sequence of SEQ ID NO:4452;
   [0617] (11) (i) a VH comprising a VH CDR1, a VH CDR2, and a VH CDR3 having an amino acid sequence of a VH CDR1, a VH CDR2, and a VH CDR3, respectively, of a VH having an amino acid sequence of SEQ ID NO:4485; and (ii) a VL comprising a VL CDR1, a VL CDR2, and a VL CDR3 having an amino acid sequence of a VL CDR1, a VL CDR2, and a VL CDR3, respectively, of a VL having an amino acid sequence of SEQ ID NO:4486;
   [0618] (12) (i) a VH comprising a VH CDR1, a VH CDR2, and a VH CDR3 having an amino acid sequence of a VH CDR1, a VH CDR2, and a VH CDR3, respectively, of a VH having an amino acid sequence of SEQ ID NO:4519; and (ii) a VL comprising a VL CDR1, a VL CDR2, and a VL CDR3 having an amino acid sequence of a VL CDR1, a VL CDR2, and a VL CDR3, respectively, of a VL having an amino acid sequence of SEQ ID NO:4520;
   [0619] (13) (i) a VH comprising a VH CDR1, a VH CDR2, and a VH CDR3 having an amino acid sequence of a VH CDR1, a VH CDR2, and a VH CDR3, respectively, of a VH having an amino acid sequence of SEQ ID NO:4553; and (ii) a VL comprising a VL CDR1, a VL CDR2, and a VL CDR3 having an amino acid sequence of a VL CDR1, a VL CDR2, and a VL CDR3, respectively, of a VL having an amino acid sequence of SEQ ID NO:4554;
   [0620] (14) (i) a VH comprising a VH CDR1, a VH CDR2, and a VH CDR3 having an amino acid sequence of a VH CDR1, a VH CDR2, and a VH CDR3, respectively, of a VH having an amino acid sequence of SEQ ID NO:4587; and (ii) a VL comprising a VL CDR1, a VL CDR2, and a VL CDR3 having an amino acid sequence of a VL CDR1, a VL CDR2, and a VL CDR3, respectively, of a VL having an amino acid sequence of SEQ ID NO:4588;
   [0621] (15) (i) a VH comprising a VH CDR1, a VH CDR2, and a VH CDR3 having an amino acid sequence of a VH CDR1, a VH CDR2, and a VH CDR3, respectively, of a VH having an amino acid sequence of SEQ ID NO:4621; and (ii) a VL comprising a VL CDR1, a VL CDR2, and a VL CDR3 having an amino acid sequence of a VL CDR1, a VL CDR2, and a VL CDR3, respectively, of a VL having an amino acid sequence of SEQ ID NO:4622; or
   [0622] (16) (i) a VH comprising a VH CDR1, a VH CDR2, and a VH CDR3 having an amino acid sequence of a VH CDR1, a VH CDR2, and a VH CDR3, respectively, of a VH having an amino acid sequence of SEQ ID NO:4655; and (ii) a VL comprising a VL CDR1, a VL CDR2, and a VL CDR3 having an amino acid sequence of a VL CDR1, a VL CDR2, and a VL CDR3, respectively, of a VL having an amino acid sequence of SEQ ID NO:4656.
[0623] C2. The antibody of embodiment C1, wherein the VH CDR1, VH CDR2, VH CDR3, VL CDR1, VL CDR2, and VL CDR3 amino acid sequences are according to the Kabat numbering system.
[0624] C3. The antibody of embodiment C1, wherein the VH CDR1, VH CDR2, VH CDR3, VL CDR1, VL CDR2, and VL CDR3 amino acid sequences are according to the Chothia numbering system.
[0625] C4. The antibody of embodiment C1, wherein the VH CDR1, VH CDR2, VH CDR3, VL CDR1, VL CDR2, and VL CDR3 amino acid sequences are according to the AbM numbering system.
[0626] C5. The antibody of embodiment C1, wherein the VH CDR1, VH CDR2, VH CDR3, VL CDR1, VL CDR2, and VL CDR3 amino acid sequences are according to the Contact numbering system.
[0627] C6. The antibody of embodiment C1, wherein the VH CDR1, VH CDR2, VH CDR3, VL CDR1, VL CDR2, and VL CDR3 amino acid sequences are according to the IMGT numbering system.
[0628] C7. The antibody of any one of embodiments C1 to C6, wherein the antibody is a humanized antibody.
[0629] C8. The antibody of any one of embodiments C1 to C7, wherein the antibody is an IgG antibody.
[0630] C9. The antibody of embodiment C8, wherein the IgG antibody is an IgG1, IgG2, IgG3, or IgG4 antibody.
[0631] C10. The antibody of any one of embodiments C1 to C9, wherein the antibody comprises a kappa light chain.
[0632] C11. The antibody of any one of embodiments C1 to C9, wherein the antibody comprises a lambda light chain.
[0633] C12. The antibody of any one of embodiments C1 to C11, wherein the antibody is a monoclonal antibody.
[0634] C13. The antibody of any one of embodiments C1 to C12, wherein the antibody binds a TRGDC antigen.
[0635] C14. The antibody of any one of embodiments C1 to C12, wherein antibody binds a TRGDC epitope.
[0636] C15. The antibody of any one of embodiments C1 to C14, wherein the antibody specifically binds to TRGDC.
[0637] C16. The antibody of any one of embodiments C1 to C15, wherein the VH CDR1, VH CDR2, VH CDR3, VL CDR1, VL CDR2 and VL CDR3 form a binding site for an antigen of the TRGDC.
[0638] C17. The antibody of any one of embodiments C1 to C15, wherein the VH CDR1, VH CDR2, VH CDR3, VL CDR1, VL CDR2 and VL CDR3 form a binding site for an epitope of the TRGDC.
[0639] C18. The antibody of any one of embodiments C1 to C17, wherein the TRGDC is present on the surface of a T cell.
[0640] C19. The antibody of any one of embodiments C1 to C18, wherein the antibody is multivalent.
[0641] C20. The antibody of embodiment C19, wherein the antibody is capable of binding at least three antigens.
[0642] C21. The antibody of embodiment C19, wherein the antibody is capable of binding at least five antigens.
[0643] C22. The antibody of any one of embodiments C1 to C21, wherein the antibody is a multispecific antibody.
[0644] C23. The antibody of embodiment C22, wherein the antibody is a bispecific antibody.
[0645] C24. A nucleic acid sequence encoding the antibody of any one of embodiments C1 to C23.
[0646] C25. A vector comprising the nucleic acid sequence of embodiment C24.
[0647] C26. A host cell comprising the vector of embodiment C25.
[0648] C27. A kit comprising the vector of embodiment C25 and packaging for the same.
[0649] C28. A kit comprising the antibody of any one of embodiments C1 to C23 and packaging for the same.
[0650] C29. A pharmaceutical composition comprising the antibody of any one of embodiments C1 to C23, and a pharmaceutically acceptable carrier.
[0651] C30. A method of producing the pharmaceutical composition of embodiment C29, comprising combining the antibody with a pharmaceutically acceptable carrier to obtain the pharmaceutical composition.
[0652] C31. A method of activating a T cell expressing TRGDC, comprising contacting the T cell with the antibody of any one of embodiments C1 to C23.
[0653] C32. The method of embodiment C31, wherein the contacting results in an increase in CD69, CD25, and/or Granzyme B expression, as compared to a control T cell expressing TRGDC.

[0654] Provided in the Examples herein are exemplary antibodies that bind to TRGV9. Also provided in the Examples herein are exemplary antibodies that bind to TRDV2. Also provided in the Examples herein are exemplary antibodies that bind to TRGDC. Exemplary binding agents that bind to TRGV9 are provided herein, for example in the Examples, as well as Tables 2-7. Exemplary binding agents that bind to TRDV2 are provided herein, for example in the Examples, as well as Tables 2-7. Exemplary binding agents that bind to TRGDC are provided herein, for example in the Examples, as well as Tables 2-7.

[0655] Particular embodiments of this invention are described herein. Upon reading the foregoing description, variations of the disclosed embodiments may become apparent to individuals working in the art, and it is expected that those skilled artisans may employ such variations as appropriate. Accordingly, it is intended that the invention be practiced otherwise than as specifically described herein, and that the invention includes all modifications and equivalents of the subject matter recited in the claims appended hereto as permitted by applicable law. Moreover, any combination of the above-described elements in all possible variations thereof is encompassed by the invention unless otherwise indicated herein or otherwise clearly contradicted by context. A number of embodiments of the invention have been described. Nevertheless, it will be understood that various modifications may be made without departing from the spirit and scope of the invention. Accordingly, the descriptions in the Examples section are intended to illustrate but not limit the scope of invention described in the claims.

### EXAMPLES

### Example 1: Production of Antibodies that Bind γδ T Cells

1.1: Production of Mabs that Bind γδ T Cell Antigens

[0656] Antigens or portions of antigens specific for γδ T cells are used to immunize an animal (e.g., a mouse or a rabbit). To generate the γδ T cell monoclonal antibodies, peripheral blood mononuclear cells are isolated from the whole blood of the immunized animal, and antigen specific B cells are grown. B cells secreting reactive antibodies for the γδ T cell antigens are identified by an antigen-binding ELISA screening of the B cell culture supernatants. High binding ELISA plates are coated with the γδ T cell antigen overnight. The ELISA plates are blocked, and diluted B cell culture supernatants are added to the plates. The plates are incubated at room temperature and following incubation, a secondary antibody specific for recognizing the γδ T cell antigen antibody is added to the plate to determine if the γδ T cell antigen antibody bound the γδ T cell antigen. Binding of the antibody is determined by reaction of a substrate on the secondary antibody.

[0657] After the identification of monoclonal antibodies that are capable of binding γδ T cell antigens, the variable regions of the heavy and light chains of the γδ T cell antibody are sequenced. γδ T cell antibodies that bind to TRGV9, TRDV2 and TRGDC are produced. Constructs are created for the expression of the heavy and light chain of the γδ T cell antibody. The constructs are transfected into a host cell to express the heavy and light chains, and the γδ T cell antibody is isolated from the supernatant.

### 1.2: Generation of Trgv9 Antibodies, Trdv2 Antibodies, and Trgdc Antibodies

[0658] Immunogen. A recombinant human TCR Vγ9×Vδ2 fused to a human Fc was used as an immunogen, and the sequence is listed in Table 1.

TABLE 1
Amino acid sequence of recombinant human TCR Vγ9 × Vδ2
heterodimeric protein fused to human Fc

| | Protein | | SEQ ID |
|---|---|---|---|
| Name | ID | Sequence | NO: |
| Recombinant | Vg9 | MAWVWTLLFLMAAAQSIQAAGHLEQPQISSTKTLSKTARLECVV | 4659 |
| human [TCR | chain | SGITISATSVYWYRERPGEVIQFLVSISYDGTVRKESGIPSGKF | |
| Vg9 × Vd2]- | | EVDRIPETSTSTLTIHNVEKQDIATYYCALWEAQQELGKKIKVF | |
| hFc | | GPGTKLIITDKQLDADVSPKPTIFLPSIAETKLQKAGTYLCLLE | |
| | | KFFPDVIKIHWEEKKSNTILGSQEGNTMKTNDTYMKFSWLTVPE | |
| | | KSLDKEHRCIVRHENNKNGVDQEIIFPPIKTDVITMDPKDNEPK | |
| | | SCDKTHTCPPCPAPELLGGPSVFLFPPKPKDTLMISRTPEVTCV | |
| | | VVDVSHEDPEVKFNWYVDGVEVHNAKTKPREEQYNSTYRVVSVL | |
| | | TVLHQDWLNGKEYKCKVSNKALPAPIEKTISKAKGQPREPQVYV | |
| | | YPPSREEMTKNQVSLTCLVKGFYPSDIAVEWESNGQPENNYKTT | |
| | | PPVLDSDGSFALVSKLTVDKSRWQQGNVFSCSVMHEALHNHYTQ | |
| | | KSLSLSPGK | |
| | Vd2 | MAWVWTLLFLMAAAQSIQAAIELVPEHQTVPVSIGVPATLRCSM | 4660 |
| | chain | KGEAIGNYYINWYRKTQGNTMTFIYREKDIYGPGFKDNFQGDID | |
| | | IAKNLAVLKILAPSERDEGSYYCACDTLGMGGEYTDKLIFGKGT | |
| | | RVTVEPRSQPHTKPSVFVMKNGTNVACLVKEFYPKDIRINLVSS | |
| | | KKITEFDPAIVISPSGKYNAVKLGKYEDSNSVTCSVQHDNKTVH | |
| | | STDFEVKTDSTDHVKPKETENTKQPSKSEPKSCDKTHTCPPCPA | |
| | | PELLGGPSVFLFPPKPKDTLMISRTPEVTCVVVDVSHEDPEVKF | |
| | | NWYVDGVEVHNAKTKPREEQYNSTYRVVSVLTVLHQDWLNGKEY | |
| | | KCKVSNKALPAPIEKTISKAKGQPREPQVYVLPPSREEMTKNQV | |
| | | SLLCLVKGFYPSDIAVEWESNGQPENNYLTWPPVLDSDGSFFLY | |
| | | SKLTVDKSRWQQGNVFSCSVMHEALHNHYTQKSLSLSPGK | |

[0659] Protein Production of the Immunogen. Expression plasmids encoding the immunogen (see Table 1) were transfected into CHO cell at a DNA ratio of 1:1. Total amount of DNA for a 750 mL expression scale was 750 μg. Final expression volume was 1 L after two feedings and enhancer additions. Using an ÄKTAPRIME plus instrument (GE Healthcare Life Sciences), supernatant (1 L) after 7 days was applied with a flow-rate of 5 mL/min to a MABSELECT SURE (GE Life Sciences) with a column volume (CV) of 10 mL pre-equilibrated with phosphate buffered saline (PBS), pH 6.8. Non-specific proteins binding to the column material was washed off with PBS supplemented with 500 mM NaCl, pH 6.8 (5 CV). The Fc-containing immunogen was eluted stepwise with 40 mM sodium acetate pH 5.0 (5 CV), pH 4.5 (5 CV), pH 4.0 (10 CV), pH 3.5 (5 CV), and pH 3.0 (5 CV). Fractions were pooled, and applied (5 mL) at a flow-rate of 0.2 mL/min on to a HiLoad 16/600 SUPERDEX (GE Healthcare) column pre-equilibrated with PBS (pH 6.8). Target protein was eluted, pooled, and analyzed by SDS-PAGE, analytic SEC, and intact mass by mass spectrometry. Purity was estimated to >99%.

[0660] Antibodies were generated using ALIVAMAB transgenic mice technology (Ablexis). ALIVAMAB mice were immunized with recombinant human Vγ9/Vδ2 TCR protein. Lymphocytes were extracted from secondary lymphoid organs and either fused with FO mouse myeloma cell line for hybridoma generation or subjected to single cell sorting via FACS. Hybridoma supernatants were screened by MSD electrochemiluminescence or by FACS for binding to γδ T cells. Confirmed cell binders were light chain isotyped via ELISA. Single cell sorting supernatants were screened by MSD electrochemiluminescence for binding to recombinant human Vγ9/Vδ2 protein. Several hits with the desired binding profile were selected and sequenced, as provided below.

[0661] The VH and VL sequences of certain TRGV9, TRDV2, and TRGDC antibodies are provided in Table 2. The CDRs sequences of certain TRGV9, TRDV2, and TRGDC antibodies are provided in Table 3 (Kabat), Table 4 (Chothia), Table 5 (AbM), Table 6 (Contact), and Table 7 (IMGT).

TABLE 2
VH and VL Amino Acid Sequences

| | Protein | HC | LC | VH AA | VL AA | | |
|---|---|---|---|---|---|---|---|
| # | Name | Isotype | Isotype | sequence | sequence | Heavy Chain AA sequence | Light Chain AA sequence |
| 1 | VG9B54 | IgG1 | Kappa | EVQLVESGGGL | EIVMTQSPGT | EVQLVESGGGLVKPGGSLRLSCAASGFAFSSYSLTWVR | EIVMTQSPGTLSLSPGERA |
| | | | | VKPGGSLRLSC | LSLSPGERAT | QAPGKGLEWVSSISSSSSYIFYADSVKGRFTISRDNAK | TLSCRASQSVSSSYLAWFQ |
| | | | | AASGFAFSSYS | LSCRASQSVS | NSLYLQMNSLRAEDTAVYYCATDGELGPFDYWGQGTTV | QKPGQAPRRLIYGASSRAT |
| | | | | LTWVRQAPGKG | SSYLAWFQQK | TVSSASTKGPSVFPLAPSSKSTSGGTAALGCLVKDYFP | GIPDRFSGSGSGTDFTLTI |
| | | | | LEWVSSISSSS | PGQAPRRLIY | EPVTVSWNSGALTSGVHTFPAVLQSSGLYSLSSVVTVP | SRLEPEDFAVYYCQQYGRS |
| | | | | SYIFYADSVKG | GASSRATGIP | SSSLGTQTYICNVNHKPSNTKVDKKVEPKSCDKTHTCP | PLTFGGGTKVEIKRTVAAP |
| | | | | RFTISRDNAKN | DRFSGSGSGT | PCPAPELLGGPSVFLFPPKPKDTLMISRTPEVTCVVVD | SVFIFPPSDEQLKSGTASV |
| | | | | SLYLQMNSLRA | DFTLTISRLE | VSHEDPEVKFNWYVDGVEVHNAKTKPREEQYNSTYRVV | VCLLNNFYPREAKVQWKVD |
| | | | | EDTAVYYCATD | PEDFAVYYCQ | SVLTVLHQDWLNGKEYKCKVSNKALPAPIEKTISKAKG | NALQSGNSQESVTEQDSKD |
| | | | | GELGPFDYWGQ | QYGRSPLTFG | QPREPQVYTLPPSREEMTKNQVSLTCLVKGFYPSDIAV | STYSLSSTLTLSKADYEKH |
| | | | | GTTVTVSS | GGTKVEIK | EWESNGQPENNYKTTPPVLDSDGSFFLYSKLTVDKSRW | KVYACEVTHQGLSSPVTKS |
| | | | | | | QQGNVFSCSVMHEALHNHYTQKSLSLSPGK | FNRGEC |
| | | | | 31 | 32 | 33 | 34 |
| 2 | VG9B121 | IgG1 | Kappa | EVQLVESGGGL | DIQMTQSPGT | EVQLVESGGGLVKPGGSLRLSCVASGFTFSDYAMDWVR | DIQMTQSPGTLSSSPGERA |
| | | | | VKPGGSLRLSC | LSSSPGERAT | QAPGKGLDWISSISSTSNYIFYADSVKGRFTISRDNAK | TLSCRASQSVSSSYFAWYQ |
| | | | | VASGFTFSDYA | LSCRASQSVS | NSLYLQMNSLRVEDSAVYYCANSYNWNYGGAFDIWGQG | QKPGRAPRLLIYGASSRAT |
| | | | | MDWVRQAPGKG | SSYFAWYQQK | TMVTVSSASTKGPSVFPLAPSSKSTSGGTAALGCLVKD | GIPDRFSGSGSGTDFTLTI |
| | | | | LDWISSISSTS | PGRAPRLLIY | YFPEPVTVSWNSGALTSGVHTFPAVLQSSGLYSLSSVV | SRLEPEDFAVYFCQQYGRS |
| | | | | NYIFYADSVKG | GASSRATGIP | TVPSSSLGTQTYICNVNHKPSNTKVDKKVEPKSCDKTH | PLTFGGGTKVEIKRTVAAP |
| | | | | RFTISRDNAKN | DRFSGSGSGT | TCPPCPAPELLGGPSVFLFPPKPKDTLMISRTPEVTCV | SVFIFPPSDEQLKSGTASV |
| | | | | SLYLQMNSLRV | DFTLTISRLE | VVDVSHEDPEVKFNWYVDGVEVHNAKTKPREEQYNSTY | VCLLNNFYPREAKVQWKVD |
| | | | | EDSAVYYCANS | PEDFAVYFCQ | RVVSVLTVLHQDWLNGKEYKCKVSNKALPAPIEKTISK | NALQSGNSQESVTEQDSKD |
| | | | | YNWNYGGAFDI | QYGRSPLTFG | AKGQPREPQVYTLPPSREEMTKNQVSLTCLVKGFYPSD | STYSLSSTLTLSKADYEKH |
| | | | | WGQGTMVTVSS | GGTKVEIK | IAVEWESNGQPENNYKTTPPVLDSDGSFFLYSKLTVDK | KVYACEVTHQGLSSPVTKS |
| | | | | | | SRWQQGNVFSCSVMHEALHNHYTQKSLSLSPGK | FNRGEC |
| | | | | 65 | 66 | 67 | 68 |
| 3 | VG9B429 | IgG1 | Kappa | QVQLVQSGGGL | DIQMTQSPSS | QVQLVQSGGGLVKPGGSLRLSCSASGFTFSNYDMNWVR | DIQMTQSPSSVSASVGDRV |
| | | | | VKPGGSLRLSC | VSASVGDRVT | QAPGKGLEWVSSISSSSSYIYYADSVKGRFTISRDNAK | TITCRASQGINSWLAWYQQ |
| | | | | SASGFTFSNYD | ITCRASQGIN | NSLYLQMNSLRAEDTAVYHCARDVGVTTDYYYYGMDVW | KPGNAPKLLIYAASSLQSG |
| | | | | MNWVRQAPGKG | SWLAWYQQKP | GQGTMVTVSSASTKGPSVFPLAPSSKSTSGGTAALGCL | VPSRFSGIGSGTDFIFTIS |
| | | | | LEWVSSISSSS | GNAPKLLIYA | VKDYFPEPVTVSWNSGALTSGVHTFPAVLQSSGLYSLS | SLQPEDFASYYCQQANSFP |
| | | | | SYIYYADSVKG | ASSLQSGVPS | SVVTVPSSSLGTQTYICNVNHKPSNTKVDKKVEPKSCD | WTFGQGTRLEIKRTVAAPS |
| | | | | RFTISRDNAKN | RFSGIGSGTD | KTHTCPPCPAPELLGGPSVFLFPPKPKDTLMISRTPEV | VFIFPPSDEQLKSGTASVV |
| | | | | SLYLQMNSLRA | FIFTISSLQP | TCVVVDVSHEDPEVKFNWYVDGVEVHNAKTKPREEQYN | CLLNNFYPREAKVQWKVDN |
| | | | | EDTAVYHCARD | EDFASYYCQQ | STYRVVSVLTVLHQDWLNGKEYKCKVSNKALPAPIEKT | ALQSGNSQESVTEQDSKDS |
| | | | | VGVTTDYYYYG | ANSFPWTFGQ | ISKAKGQPREPQVYTLPPSREEMTKNQVSLTCLVKGFY | TYSLSSTLTLSKADYEKHK |
| | | | | MDVWGQGTMVT | GTRLEIK | PSDIAVEWESNGQPENNYKTTPPVLDSDGSFFLYSKLT | VYACEVTHQGLSSPVTKSF |
| | | | | VSS | | VDKSRWQQGNVFSCSVMHEALHNHYTQKSLSLSPGK | NRGEC |
| | | | | 99 | 100 | 101 | 102 |
| 4 | VG9B370 | IgG1 | Kappa | EVQLVESGGGL | EIVLTQSPGT | EVQLVESGGGLVKPGGSLRLSCAASRFTLSSYDMNWVR | EIVLTQSPGTLSLSPGERA |
| | | | | VKPGGSLRLSC | LSLSPGERAT | QAPGKGLEWVSSISSSSSYIYYADSVKGRFTISRDNAK | TLSCRASQSVSSSYLAWYQ |
| | | | | AASRFTLSSYD | LSCRASQSVS | NSLYLQMNSLRAEDTAVYYCARDRGVGGTDYYYYGLDV | QKPGQAPRLLIYGASSRAT |
| | | | | MNWVRQAPGKG | SSYLAWYQQK | WGQGTTVTVSSASTKGPSVFPLAPSSKSTSGGTAALGC | GIPDRFSGSGSGTDFTLTI |
| | | | | LEWVSSISSSS | PGQAPRLLIY | LVKDYFPEPVTVSWNSGALTSGVHTFPAVLQSSGLYSL | SRLEPEDFAVYYCQQYGSS |
| | | | | SYIYYADSVKG | GASSRATGIP | SSVVTVPSSSLGTQTYICNVNHKPSNTKVDKKVEPKSC | PPYTFGQGTKVEIKRTVAA |
| | | | | RFTISRDNAKN | DRFSGSGSGT | DKTHTCPPCPAPELLGGPSVFLFPPKPKDTLMISRTPE | PSVFIFPPSDEQLKSGTAS |
| | | | | SLYLQMNSLRA | DFTLTISRLE | VTCVVVDVSHEDPEVKFNWYVDGVEVHNAKTKPREEQY | VVCLLNNFYPREAKVQWKV |
| | | | | EDTAVYYCARD | PEDFAVYYCQ | NSTYRVVSVLTVLHQDWLNGKEYKCKVSNKALPAPIEK | DNALQSGNSQESVTEQDSK |
| | | | | RGVGGTDYYYY | QYGSSPPYTF | TISKAKGQPREPQVYTLPPSREEMTKNQVSLTCLVKGF | DSTYSLSSTLTLSKADYEK |
| | | | | GLDVWGQGTTV | GQGTKVEIK | YPSDIAVEWESNGQPENNYKTTPPVLDSDGSFFLYSKL | HKVYACEVTHQGLSSPVTK |
| | | | | TVSS | | TVDKSRWQQGNVFSCSVMHEALHNHYTQKSLSLSPGK | SFNRGEC |
| | | | | 133 | 134 | 135 | 136 |
| 5 | VG9B80 | IgG1 | Kappa | EVQLVQSGGGL | EIVLTQSPGT | EVQLVQSGGGLVKSGGSLRLSCAASGFTFSTYSMNWVR | EIVLTQSPGTLSLSAGERA |
| | | | | VKSGGSLRLSC | LSLSAGERAT | QAPGKGLEWVSSISSSSSYIFYADSVKGRIIISRDNAK | TLSCRASQSISSSYLAWYQ |
| | | | | AASGFTFSTYS | LSCRASQSIS | NSLYLQMNSVRADDTAVYYCAKDGELGVFDYWGQGTLV | QKPGQAPRVLIYGPSGRAT |
| | | | | MNWVRQAPGKG | SSYLAWYQQK | TVSSASTKGPSVFPLAPSSKSTSGGTAALGCLVKDYFP | GIPDRFRGSGSGTDFTLTI |
| | | | | LEWVSSISSSS | PGQAPRVLIY | EPVTVSWNSGALTSGVHTFPAVLQSSGLYSLSSVVTVP | SRLEPEDFAVYYCQQFGRS |
| | | | | SYIFYADSVKG | GPSGRATGIP | SSSLGTQTYICNVNHKPSNTKVDKKVEPKSCDKTHTCP | PLTFGGGTKVEIKRTVAAP |
| | | | | RIIISRDNAKN | DRFRGSGSGT | PCPAPELLGGPSVFLFPPKPKDTLMISRTPEVTCVVVD | SVFIFPPSDEQLKSGTASV |
| | | | | SLYLQMNSVRA | DFTLTISRLE | VSHEDPEVKFNWYVDGVEVHNAKTKPREEQYNSTYRVV | VCLLNNFYPREAKVQWKVD |
| | | | | DDTAVYYCAKD | PEDFAVYYCQ | SVLTVLHQDWLNGKEYKCKVSNKALPAPIEKTISKAKG | NALQSGNSQESVTEQDSKD |
| | | | | GELGVFDYWGQ | QFGRSPLTFG | QPREPQVYTLPPSREEMTKNQVSLTCLVKGFYPSDIAV | STYSLSSTLTLSKADYEKH |
| | | | | GTLVTVSS | GGTKVEIK | EWESNGQPENNYKTTPPVLDSDGSFFLYSKLTVDKSRW | KVYACEVTHQGLSSPVTKS |
| | | | | | | QQGNVFSCSVMHEALHNHYTQKSLSLSPGK | FNRGEC |
| | | | | 167 | 168 | 169 | 170 |
| 6 | VG9B414 | IgG1 | Kappa | EVQLVESGGGL | EIVMTQSPSS | EVQLVESGGGLVKPGGSLRLSCSASGFTFSNYDMNWVR | EIVMTQSPSSVSASVGDRV |
| | | | | VKPGGSLRLSC | VSASVGDRVT | QAPGKGLEWVSSISSSSSYIYYADSVKGRFTISRDNAK | TITCRASQGINSWLAWYQQ |
| | | | | SASGFTFSNYD | ITCRASQGIN | NSLYLQMNSLRAEDTAVYHCARDVGVTTDYYYYGMDVW | KPGNAPKLLIYAASSLQSG |
| | | | | MNWVRQAPGKG | SWLAWYQQKP | GQGTMVTVSSASTKGPSVFPLAPSSKSTSGGTAALGCL | VPSRFSGIGSGTDFIFTIS |
| | | | | LEWVSSISSSS | GNAPKLLIYA | VKDYFPEPVTVSWNSGALTSGVHTFPAVLQSSGLYSLS | SLQPEDFASYYCQQANSFP |
| | | | | SYIYYADSVKG | ASSLQSGVPS | SVVTVPSSSLGTQTYICNVNHKPSNTKVDKKVEPKSCD | WTFGQGTRLEIKRTVAAPS |
| | | | | RFTISRDNAKN | RFSGIGSGTD | KTHTCPPCPAPELLGGPSVFLFPPKPKDTLMISRTPEV | VFIFPPSDEQLKSGTASVV |
| | | | | SLYLQMNSLRA | FIFTISSLQP | TCVVVDVSHEDPEVKFNWYVDGVEVHNAKTKPREEQYN | CLLNNFYPREAKVQWKVDN |
| | | | | EDTAVYHCARD | EDFASYYCQQ | STYRVVSVLTVLHQDWLNGKEYKCKVSNKALPAPIEKT | ALQSGNSQESVTEQDSKDS |
| | | | | VGVTTDYYYYG | ANSFPWTFGQ | ISKAKGQPREPQVYTLPPSREEMTKNQVSLTCLVKGFY | TYSLSSTLTLSKADYEKHK |
| | | | | MDVWGQGTMVT | GTRLEIK | PSDIAVEWESNGQPENNYKTTPPVLDSDGSFFLYSKLT | VYACEVTHQGLSSPVTKSF |
| | | | | VSS | | VDKSRWQQGNVFSCSVMHEALHNHYTQKSLSLSPGK | NRGEC |
| | | | | 201 | 202 | 203 | 204 |
| 7 | VG9B195 | IgG1 | Lambda | EVQLVESGGGL | SYELMQPPSV | EVQLVESGGGLVKPGGSLRLSCAASGFTFSPYTMNWVR | SYELMQPPSVSVSPGQTAS |
| | | | | VKPGGSLRLSC | SVSPGQTASI | QAPGKGLEWVSSISSSSSYMYYADSVKGRFTISRDNAK | ITCSGDKLGDKYACWYQQK |
| | | | | AASGFTFSPYT | TCSGDKLGDK | NSLYLQMNSLRAEDTAVYYCARDGDLVGPTYYFDYWGQ | PGQSPVLVIYQHNKRPSGI |
| | | | | MNWVRQAPGKG | YACWYQQKPG | GTLVTVSSASTKGPSVFPLAPSSKSTSGGTAALGCLVK | PERFSGSNSGKTATLTISG |
| | | | | LEWVSSISSSS | QSPVLVIYQH | DYFPEPVTVSWNSGALTSGVHTFPAVLQSSGLYSLSSV | TQAMDEADYYCQAWDSTTV |
| | | | | SYMYYADSVKG | NKRPSGIPER | VTVPSSSLGTQTYICNVNHKPSNTKVDKKVEPKSCDKT | VFGGGTKLTVLGQPKAAPS |
| | | | | RFTISRDNAKN | FSGSNSGKTA | HTCPPCPAPELLGGPSVFLFPPKPKDTLMISRTPEVTC | VTLFPPSSEELQANKATLV |
| | | | | SLYLQMNSLRA | TLTISGTQAM | VVVDVSHEDPEVKFNWYVDGVEVHNAKTKPREEQYNST | CLISDFYPGAVTVAWKADS |
| | | | | EDTAVYYCARD | DEADYYCQAW | YRVVSVLTVLHQDWLNGKEYKCKVSNKALPAPIEKTIS | SPVKAGVETTTPSKQSNNK |
| | | | | GDLVGPTYYFD | DSTTVVFGGG | KAKGQPREPQVYTLPPSREEMTKNQVSLTCLVKGFYPS | YAASSYLSLTPEQWKSHRS |
| | | | | YWGQGTLVTVS | TKLTVL | DIAVEWESNGQPENNYKTTPPVLDSDGSFFLYSKLTVD | YSCQVTHEGSTVEKTVAPT |
| | | | | S | | KSRWQQGNVFSCSVMHEALHNHYTQKSLSLSPGK | ECS |
| | | | | 235 | 236 | 237 | 238 |
| 8 | VG9B140 | IgG1 | Kappa | EVQLVESGGGL | EIVMTQSPGT | EVQLVESGGGLVKPGGSLRLSCAGSGFTFRSYDMNWVR | EIVMTQSPGTLSLSPGERA |
| | | | | VKPGGSLRLSC | LSLSPGERAT | QAPGKGLEWVSSISTSSGYIYYADSVKGRFTISRDNAK | TLSCRASQSVSSSYLAWYQ |
| | | | | AGSGFTFRSYD | LSCRASQSVS | NSLSLQMNSLRAEDTAVFYCARDRGIAVAGDYYYGMDV | QKPGQAPRLLIYGASSRAT |
| | | | | MNWVRQAPGKG | SSYLAWYQQK | WGQGTMVTVSSASTKGPSVFPLAPSSKSTSGGTAALGC | GIPDRFSGSGSGTDFTLTI |
| | | | | LEWVSSISTSS | PGQAPRLLIY | LVKDYFPEPVTVSWNSGALTSGVHTFPAVLQSSGLYSL | SRLEAEDFAVYYCQQYGSS |
| | | | | GYIYYADSVKG | GASSRATGIP | SSVVTVPSSSLGTQTYICNVNHKPSNTKVDKKVEPKSC | PPYTFGQGTKVEIKRTVAA |
| | | | | RFTISRDNAKN | DRFSGSGSGT | DKTHTCPPCPAPELLGGPSVFLFPPKPKDTLMISRTPE | PSVFIFPPSDEQLKSGTAS |
| | | | | SLSLQMNSLRA | DFTLTISRLE | VTCVVVDVSHEDPEVKFNWYVDGVEVHNAKTKPREEQY | VVCLLNNFYPREAKVQWKV |
| | | | | EDTAVFYCARD | AEDFAVYYCQ | NSTYRVVSVLTVLHQDWLNGKEYKCKVSNKALPAPIEK | DNALQSGNSQESVTEQDSK |
| | | | | RGIAVAGDYYY | QYGSSPPYTF | TISKAKGQPREPQVYTLPPSREEMTKNQVSLTCLVKGF | DSTYSLSSTLTLSKADYEK |
| | | | | GMDVWGQGTMV | GQGTKVEIK | YPSDIAVEWESNGQPENNYKTTPPVLDSDGSFFLYSKL | HKVYACEVTHQGLSSPVTK |
| | | | | TVSS | | TVDKSRWQQGNVFSCSVMHEALHNHYTQKSLSLSPGK | SFNRGEC |
| | | | | 269 | 270 | 271 | 272 |
| 9 | VG9B426 | IgG1 | Kappa | EVQLVQSGGGL | ETTLTQSPGT | EVQLVQSGGGLVKPGGSLRLSCSASGFTFSNYDMNWVR | ETTLTQSPGTLSLSPGDRA |
| | | | | VKPGGSLRLSC | LSLSPGDRAT | QAPGKGLEWVSSISSSSSYIYYADSVKGRFTISRDNAK | TLSCRASQSVASSYLAWYQ |
| | | | | SASGFTFSNYD | LSCRASQSVA | NSLYLQMNSLRAEDTAVYHCARDVGVTTDYYYYGMDVW | QKPGQSPRLLIYGASSRAT |
| | | | | MNWVRQAPGKG | SSYLAWYQQK | GQGTMVTVSSASTKGPSVFPLAPSSKSTSGGTAALGCL | GIPDRFSGSGSGTDFTLTI |
| | | | | LEWVSSISSSS | PGQSPRLLIY | VKDYFPEPVTVSWNSGALTSGVHTFPAVLQSSGLYSLS | SRLEPEDFAVYYCQQYGSS |
| | | | | SYIYYADSVKG | GASSRATGIP | SVVTVPSSSLGTQTYICNVNHKPSNTKVDKKVEPKSCD | PPYTFGQGTKVEIKRTVAA |
| | | | | RFTISRDNAKN | DRFSGSGSGT | KTHTCPPCPAPELLGGPSVFLFPPKPKDTLMISRTPEV | PSVFIFPPSDEQLKSGTAS |
| | | | | SLYLQMNSLRA | DFTLTISRLE | TCVVVDVSHEDPEVKFNWYVDGVEVHNAKTKPREEQYN | VVCLLNNFYPREAKVQWKV |
| | | | | EDTAVYHCARD | PEDFAVYYCQ | STYRVVSVLTVLHQDWLNGKEYKCKVSNKALPAPIEKT | DNALQSGNSQESVTEQDSK |
| | | | | VGVTTDYYYYG | QYGSSPPYTF | ISKAKGQPREPQVYTLPPSREEMTKNQVSLTCLVKGFY | DSTYSLSSTLTLSKADYEK |
| | | | | MDVWGQGTMVT | GQGTKVEIK | PSDIAVEWESNGQPENNYKTTPPVLDSDGSFFLYSKLT | HKVYACEVTHQGLSSPVTK |
| | | | | VSS | | VDKSRWQQGNVFSCSVMHEALHNHYTQKSLSLSPGK | SFNRGEC |
| | | | | 303 | 304 | 305 | 306 |
| 10 | VG9B46 | IgG1 | Kappa | EVQLVESGGGL | EIVLTQSPGT | EVQLVESGGGLVKPGGSLRLSCEASGFTFSINSMNWVR | EIVLTQSPGTLSLSPGERA |
| | | | | VKPGGSLRLSC | LSLSPGERAT | QAPGKGLEWVSSISSTSDYIFNADSVKGRFTISRDNAK | TLSCRTSQSVSRSYLGWYQ |
| | | | | EASGFTFSINS | LSCRTSQSVS | NSLYLQMNSLRAEDTAVYYCVRDDVFGAFDIWGQGTMV | QKPGQPPRLLIFGSSSRAT |
| | | | | MNWVRQAPGKG | RSYLGWYQQK | TVSSASTKGPSVFPLAPSSKSTSGGTAALGCLVKDYFP | GIPDRFSGSGSGTDFTLTI |
| | | | | LEWVSSISSTS | PGQPPRLLIF | EPVTVSWNSGALTSGVHTFPAVLQSSGLYSLSSVVTVP | SRLEPEDFAVYYCQQYSRS |
| | | | | DYIFNADSVKG | GSSSRATGIP | SSSLGTQTYICNVNHKPSNTKVDKKVEPKSCDKTHTCP | PLTFGGGTKVDIKRTVAAP |
| | | | | RFTISRDNAKN | DRFSGSGSGT | PCPAPELLGGPSVFLFPPKPKDTLMISRTPEVTCVVVD | SVFIFPPSDEQLKSGTASV |
| | | | | SLYLQMNSLRA | DFTLTISRLE | VSHEDPEVKFNWYVDGVEVHNAKTKPREEQYNSTYRVV | VCLLNNFYPREAKVQWKVD |
| | | | | EDTAVYYCVRD | PEDFAVYYCQ | SVLTVLHQDWLNGKEYKCKVSNKALPAPIEKTISKAKG | NALQSGNSQESVTEQDSKD |
| | | | | DVFGAFDIWGQ | QYSRSPLTFG | QPREPQVYTLPPSREEMTKNQVSLTCLVKGFYPSDIAV | STYSLSSTLTLSKADYEKH |
| | | | | GTMVTVSS | GGTKVDIK | EWESNGQPENNYKTTPPVLDSDGSFFLYSKLTVDKSRW | KVYACEVTHQGLSSPVTKS |
| | | | | | | QQGNVFSCSVMHEALHNHYTQKSLSLSPGK | FNRGEC |
| | | | | 337 | 338 | 339 | 340 |
| 11 | VG9B416 | IgG1 | Kappa | EVQLVESGGGL | EIVLTQSPGT | EVQLVESGGGLVKPGGSLRLSCSASGFTFSNYDMNWVR | EIVLTQSPGTLSLSPGDRA |
| | | | | VKPGGSLRLSC | LSLSPGDRAT | QAPGKGLEWVSSISSSSSYIYYADSVKGRFTISRDNAK | TLSCRASQSVASSYLAWYQ |
| | | | | SASGFTFSNYD | LSCRASQSVA | NSLYLQMNSLRAEDTAVYHCARDVGVTTDYYYYGMDVW | QKPGQSPRLLIYGASSRAT |
| | | | | MNWVRQAPGKG | SSYLAWYQQK | GQGTTVTVSSASTKGPSVFPLAPSSKSTSGGTAALGCL | GIPDRFSGSGSGTDFTLTI |
| | | | | LEWVSSISSSS | PGQSPRLLIY | VKDYFPEPVTVSWNSGALTSGVHTFPAVLQSSGLYSLS | SRLEPEDFAVYYCQQYGSS |
| | | | | SYIYYADSVKG | GASSRATGIP | SVVTVPSSSLGTQTYICNVNHKPSNTKVDKKVEPKSCD | PPYTFGQGTKLEIKRTVAA |
| | | | | RFTISRDNAKN | DRFSGSGSGT | KTHTCPPCPAPELLGGPSVFLFPPKPKDTLMISRTPEV | PSVFIFPPSDEQLKSGTAS |
| | | | | SLYLQMNSLRA | DFTLTISRLE | TCVVVDVSHEDPEVKFNWYVDGVEVHNAKTKPREEQYN | VVCLLNNFYPREAKVQWKV |
| | | | | EDTAVYHCARD | PEDFAVYYCQ | STYRVVSVLTVLHQDWLNGKEYKCKVSNKALPAPIEKT | DNALQSGNSQESVTEQDSK |
| | | | | VGVTTDYYYYG | QYGSSPPYTF | ISKAKGQPREPQVYTLPPSREEMTKNQVSLTCLVKGFY | DSTYSLSSTLTLSKADYEK |
| | | | | MDVWGQGTTVT | GQGTKLEIK | PSDIAVEWESNGQPENNYKTTPPVLDSDGSFFLYSKLT | HKVYACEVTHQGLSSPVTK |
| | | | | VSS | | VDKSRWQQGNVFSCSVMHEALHNHYTQKSLSLSPGK | SFNRGEC |
| | | | | 371 | 372 | 373 | 374 |
| 12 | VG9B69 | IgG1 | Kappa | EVQLVESGGGL | EIVMTQSPGT | EVQLVESGGGLVKPGGSLRLSCAASGFTFSSYDINWVR | EIVMTQSPGTLSLSPGERA |
| | | | | VKPGGSLRLSC | LSLSPGERAT | QAPGKGLEWVSSITSSSYYIYYADSVKGRFTISRDNAK | TLSCRASQSVSSSYLAWYQ |
| | | | | AASGFTFSSYD | LSCRASQSVS | NSLYLQMNSLRAEDTAVYYCARDLGVRGVDYYYYGLDV | QKPGQAPRLLIYGASSRAT |
| | | | | INWVRQAPGKG | SSYLAWYQQK | WGQGTMVTVSSASTKGPSVFPLAPSSKSTSGGTAALGC | GIPDRFSGSGSGTDFTLTI |
| | | | | LEWVSSITSSS | PGQAPRLLIY | LVKDYFPEPVTVSWNSGALTSGVHTFPAVLQSSGLYSL | SRLEPEDFAVYYCQQYGSS |
| | | | | YYIYYADSVKG | GASSRATGIP | SSVVTVPSSSLGTQTYICNVNHKPSNTKVDKKVEPKSC | PPYTFGQGTKVEIKRTVAA |
| | | | | RFTISRDNAKN | DRFSGSGSGT | DKTHTCPPCPAPELLGGPSVFLFPPKPKDTLMISRTPE | PSVFIFPPSDEQLKSGTAS |
| | | | | SLYLQMNSLRA | DFTLTISRLE | VTCVVVDVSHEDPEVKFNWYVDGVEVHNAKTKPREEQY | VVCLLNNFYPREAKVQWKV |
| | | | | EDTAVYYCARD | PEDFAVYYCQ | NSTYRVVSVLTVLHQDWLNGKEYKCKVSNKALPAPIEK | DNALQSGNSQESVTEQDSK |
| | | | | LGVRGVDYYYY | QYGSSPPYTF | TISKAKGQPREPQVYTLPPSREEMTKNQVSLTCLVKGF | DSTYSLSSTLTLSKADYEK |
| | | | | GLDVWGQGTMV | GQGTKVEIK | YPSDIAVEWESNGQPENNYKTTPPVLDSDGSFFLYSKL | HKVYACEVTHQGLSSPVTK |
| | | | | TVSS | | TVDKSRWQQGNVFSCSVMHEALHNHYTQKSLSLSPGK | SFNRGEC |
| | | | | 405 | 406 | 407 | 408 |
| 13 | VG9B415 | IgG1 | Kappa | EVQLVESGGGL | ETTLTQSPGT | EVQLVESGGGLVKPGGSLRLSCSASGFTFSNYDMNWVR | ETTLTQSPGTLSLSPGDRA |
| | | | | VKPGGSLRLSC | LSLSPGDRAT | QAPGKGLEWVSSISSSSSYIYYADSVKGRFTISRDNAK | TLSCRASQSVASSYLAWYQ |
| | | | | SASGFTFSNYD | LSCRASQSVA | NSLYLQMNSLRAEDTAVYHCARDVGVTTDYYYYGMDVW | QKPGQSPRLLIYGASSRAT |
| | | | | MNWVRQAPGKG | SSYLAWYQQK | GQGTTVTVSSASTKGPSVFPLAPSSKSTSGGTAALGCL | GIPDRFSGSGSGTDFTLTI |
| | | | | LEWVSSISSSS | PGQSPRLLIY | VKDYFPEPVTVSWNSGALTSGVHTFPAVLQSSGLYSLS | SRLEPEDFAVYYCQQYGSS |
| | | | | SYIYYADSVKG | GASSRATGIP | SVVTVPSSSLGTQTYICNVNHKPSNTKVDKKVEPKSCD | PPYTFGQGTKLEIKRTVAA |
| | | | | RFTISRDNAKN | DRFSGSGSGT | KTHTCPPCPAPELLGGPSVFLFPPKPKDTLMISRTPEV | PSVFIFPPSDEQLKSGTAS |
| | | | | SLYLQMNSLRA | DFTLTISRLE | TCVVVDVSHEDPEVKFNWYVDGVEVHNAKTKPREEQYN | VVCLLNNFYPREAKVQWKV |
| | | | | EDTAVYHCARD | PEDFAVYYCQ | STYRVVSVLTVLHQDWLNGKEYKCKVSNKALPAPIEKT | DNALQSGNSQESVTEQDSK |
| | | | | VGVTTDYYYYG | QYGSSPPYTF | ISKAKGQPREPQVYTLPPSREEMTKNQVSLTCLVKGFY | DSTYSLSSTLTLSKADYEK |
| | | | | MDVWGQGTTVT | GQGTKLEIK | PSDIAVEWESNGQPENNYKTTPPVLDSDGSFFLYSKLT | HKVYACEVTHQGLSSPVTK |
| | | | | VSS | | VDKSRWQQGNVFSCSVMHEALHNHYTQKSLSLSPGK | SFNRGEC |
| | | | | 439 | 440 | 441 | 442 |
| 14 | VG9B104 | IgG1 | Kappa | EVQLVESGGGL | EIVLTQSPGT | EVQLVESGGGLVKPGGSLRLSCAASGFTFSVYSMNWVR | EIVLTQSPGTLSLSPGERA |
| | | | | VKPGGSLRLSC | LSLSPGERAT | QAPGKGLEWVSSIGSSSSYIFYADSVKGRFTISRDNAK | TLSCRASQSVSSSYLAWYQ |
| | | | | AASGFTFSVYS | LSCRASQSVS | NSLYLQMNSLRAEDTAVYYCGRDHDYGGLDYWGQGTLV | QKPGQAPRLLIYGPSNRAT |
| | | | | MNWVRQAPGKG | SSYLAWYQQK | TVSSASTKGPSVFPLAPSSKSTSGGTAALGCLVKDYFP | DIPDRFSGTGSGTDFTLTI |
| | | | | LEWVSSIGSSS | PGQAPRLLIY | EPVTVSWNSGALTSGVHTFPAVLQSSGLYSLSSVVTVP | SRLEPEDFAVYYCQQYGRS |
| | | | | SYIFYADSVKG | GPSNRATDIP | SSSLGTQTYICNVNHKPSNTKVDKKVEPKSCDKTHTCP | PLTFGGGTKVEIKRTVAAP |
| | | | | RFTISRDNAKN | DRFSGTGSGT | PCPAPELLGGPSVFLFPPKPKDTLMISRTPEVTCVVVD | SVFIFPPSDEQLKSGTASV |
| | | | | SLYLQMNSLRA | DFTLTISRLE | VSHEDPEVKFNWYVDGVEVHNAKTKPREEQYNSTYRVV | VCLLNNFYPREAKVQWKVD |
| | | | | EDTAVYYCGRD | PEDFAVYYCQ | SVLTVLHQDWLNGKEYKCKVSNKALPAPIEKTISKAKG | NALQSGNSQESVTEQDSKD |
| | | | | HDYGGLDYWGQ | QYGRSPLTFG | QPREPQVYTLPPSREEMTKNQVSLTCLVKGFYPSDIAV | STYSLSSTLTLSKADYEKH |
| | | | | GTLVTVSS | GGTKVEIK | EWESNGQPENNYKTTPPVLDSDGSFFLYSKLTVDKSRW | KVYACEVTHQGLSSPVTKS |
| | | | | | | QQGNVFSCSVMHEALHNHYTQKSLSLSPGK | FNRGEC |
| | | | | 473 | 474 | 475 | 476 |
| 15 | VG9B198 | IgG1 | Lambda | QVQLQESGPGL | QSVLTQPPSV | QVQLQESGPGLVKPSETLSLTCTVSGDSISSIYWSWIR | QSVLTQPPSVSGAPGQRVT |
| | | | | VKPSETLSLTC | SGAPGQRVTI | QSAGKGLEWIGRIYTTDITNYNPSLKSRVTMSADTSKN | ISCTGSSSNIGAGYDVHWY |
| | | | | TVSGDSISSIY | SCTGSSSNIG | QLSLKLTSVTAADTAVYYCAKNGYSYGGFNYWGQGTLV | QRLPGTAPKLLIYGDSYRP |
| | | | | WSWIRQSAGKG | AGYDVHWYQR | TVSSASTKGPSVFPLAPSSKSTSGGTAALGCLVKDYFP | SGVPDRFSGSKSGTSASLA |
| | | | | LEWIGRIYTTD | LPGTAPKLLI | EPVTVSWNSGALTSGVHTFPAVLQSSGLYSLSSVVTVP | ITGLQAEDEADYYCQSYDS |
| | | | | ITNYNPSLKSR | YGDSYRPSGV | SSSLGTQTYICNVNHKPSNTKVDKKVEPKSCDKTHTCP | SLSVVVFGGGTKLTVLGQP |
| | | | | VTMSADTSKNQ | PDRFSGSKSG | PCPAPELLGGPSVFLFPPKPKDTLMISRTPEVTCVVVD | KAAPSVTLFPPSSEELQAN |
| | | | | LSLKLTSVTAA | TSASLAITGL | VSHEDPEVKFNWYVDGVEVHNAKTKPREEQYNSTYRVV | KATLVCLISDFYPGAVTVA |
| | | | | DTAVYYCAKNG | QAEDEADYYC | SVLTVLHQDWLNGKEYKCKVSNKALPAPIEKTISKAKG | WKADSSPVKAGVETTTPSK |
| | | | | YSYGGFNYWGQ | QSYDSSLSVV | QPREPQVYTLPPSREEMTKNQVSLTCLVKGFYPSDIAV | QSNNKYAASSYLSLTPEQW |
| | | | | GTLVTVSS | VFGGGTKLTV | EWESNGQPENNYKTTPPVLDSDGSFFLYSKLTVDKSRW | KSHRSYSCQVTHEGSTVEK |
| | | | | | L | QQGNVFSCSVMHEALHNHYTQKSLSLSPGK | TVAPTECS |
| | | | | 507 | 508 | 509 | 510 |
| 16 | VG9B463 | IgG1 | Lambda | EVQLVESGGGL | QPVLTQSSSA | EVQLVESGGGLVKPGGSLRLSCSASGFTFSNYDMNWVR | QPVLTQSSSASGTPGQRVT |
| | | | | VKPGGSLRLSC | SGTPGQRVTI | QAPGKGLEWVSSISSSSSYIYYADSVKGRFTISRDNAK | ISCSGSSSNIGSNTVNWYQ |
| | | | | SASGFTFSNYD | SCSGSSSNIG | NSLYLQMNSLRAEDTAVYHCARDVGVTTDYYYYGMDVW | QFPGTAPKLLIYTNTQRPS |
| | | | | MNWVRQAPGKG | SNTVNWYQQF | GQGTTVTVSSASTKGPSVFPLAPSSKSTSGGTAALGCL | GVPDRFSGSKSGTLVSLAI |
| | | | | LEWVSSISSSS | PGTAPKLLIY | VKDYFPEPVTVSWNSGALTSGVHTFPAVLQSSGLYSLS | SGLQSEDEADYYCAAWDDS |
| | | | | SYIYYADSVKG | TNTQRPSGVP | SVVTVPSSSLGTQTYICNVNHKPSNTKVDKKVEPKSCD | LNAWVFGGGTKLTVLGQPK |
| | | | | RFTISRDNAKN | DRFSGSKSGT | KTHTCPPCPAPELLGGPSVFLFPPKPKDTLMISRTPEV | AAPSVTLFPPSSEELQANK |
| | | | | SLYLQMNSLRA | LVSLAISGLQ | TCVVVDVSHEDPEVKFNWYVDGVEVHNAKTKPREEQYN | ATLVCLISDFYPGAVTVAW |
| | | | | EDTAVYHCARD | SEDEADYYCA | STYRVVSVLTVLHQDWLNGKEYKCKVSNKALPAPIEKT | KADSSPVKAGVETTTPSKQ |
| | | | | VGVTTDYYYYG | AWDDSLNAWV | ISKAKGQPREPQVYTLPPSREEMTKNQVSLTCLVKGFY | SNNKYAASSYLSLTPEQWK |
| | | | | MDVWGQGTTVT | FGGGTKLTVL | PSDIAVEWESNGQPENNYKTTPPVLDSDGSFFLYSKLT | SHRSYSCQVTHEGSTVEKT |
| | | | | VSS | | VDKSRWQQGNVFSCSVMHEALHNHYTQKSLSLSPGK | VAPTECS |
| | | | | 541 | 542 | 543 | 544 |
| 17 | VG9B469 | IgG1 | Kappa | EVQLVESGGGL | DIVMTQSPGT | EVQLVESGGGLVKPGGSLRLSCAASGFTFSHYDMNWVR | DIVMTQSPGTLSLSPGERA |
| | | | | VKPGGSLRLSC | LSLSPGERAT | QAPGKGLEWVSSISSSSSYIFYADSVKGRFTISRDNAK | TLSCRASQNVSSTYLAWYQ |
| | | | | AASGFTFSHYD | LSCRASQNVS | NSLLLQMNSLRAEDTAVYHCARDRGVGDTSDYYSFGLD | QKPGQAPRLLIYGACSRAT |
| | | | | MNWVRQAPGKG | STYLAWYQQK | VWGQGTMVTVSSASTKGPSVFPLAPSSKSTSGGTAALG | GIPDRFSGSGSGTDFTLTI |
| | | | | LEWVSSISSSS | PGQAPRLLIY | CLVKDYFPEPVTVSWNSGALTSGVHTFPAVLQSSGLYS | SRLEPEDYAVYYCQQYGSS |
| | | | | SYIFYADSVKG | GACSRATGIP | LSSVVTVPSSSLGTQTYICNVNHKPSNTKVDKKVEPKS | PPYTFGRGTKLEIKRTVAA |
| | | | | RFTISRDNAKN | DRFSGSGSGT | CDKTHTCPPCPAPELLGGPSVFLFPPKPKDTLMISRTP | PSVFIFPPSDEQLKSGTAS |
| | | | | SLLLQMNSLRA | DFTLTISRLE | EVTCVVVDVSHEDPEVKFNWYVDGVEVHNAKTKPREEQ | VVCLLNNFYPREAKVQWKV |
| | | | | EDTAVYHCARD | PEDYAVYYCQ | YNSTYRVVSVLTVLHQDWLNGKEYKCKVSNKALPAPIE | DNALQSGNSQESVTEQDSK |
| | | | | RGVGDTSDYYS | QYGSSPPYTF | KTISKAKGQPREPQVYTLPPSREEMTKNQVSLTCLVKG | DSTYSLSSTLTLSKADYEK |
| | | | | FGLDVWGQGTM | GRGTKLEIK | FYPSDIAVEWESNGQPENNYKTTPPVLDSDGSFFLYSK | HKVYACEVTHQGLSSPVTK |
| | | | | VTVSS | | LTVDKSRWQQGNVFSCSVMHEALHNHYTQKSLSLSPGK | SFNRGEC |
| | | | | 575 | 576 | 577 | 578 |
| 18 | VG9B428 | IgG1 | Kappa | EVQLVESGGGL | EIVMTQSPSS | EVQLVESGGGLVKPGGSLRLSCAASGFTFSNYGMNWVR | EIVMTQSPSSVSASVGDRV |
| | | | | VKPGGSLRLSC | VSASVGDRVT | QAPGKGLEWVSYISSGSSYKYYADSMKGRFTISRDNAM | TITCRASQGINSWLAWYQQ |
| | | | | AASGFTFSNYG | ITCRASQGIN | NLLYLQMNSLRPEDSAMYYCARDPVVTEYYYYGMDVWG | KPGNAPKLLIYAASSLQSG |
| | | | | MNWVRQAPGKG | SWLAWYQQKP | QGTMVTVSSASTKGPSVFPLAPSSKSTSGGTAALGCLV | VPSRFSGIGSGTDFIFTIS |
| | | | | LEWVSYISSGS | GNAPKLLIYA | KDYFPEPVTVSWNSGALTSGVHTFPAVLQSSGLYSLSS | SLQPEDFASYYCQQANSFP |
| | | | | SYKYYADSMKG | ASSLQSGVPS | VVTVPSSSLGTQTYICNVNHKPSNTKVDKKVEPKSCDK | WTFGQGTKVEIKRTVAAPS |
| | | | | RFTISRDNAMN | RFSGIGSGTD | THTCPPCPAPELLGGPSVFLFPPKPKDTLMISRTPEVT | VFIFPPSDEQLKSGTASVV |
| | | | | LLYLQMNSLRP | FIFTISSLQP | CVVVDVSHEDPEVKFNWYVDGVEVHNAKTKPREEQYNS | CLLNNFYPREAKVQWKVDN |
| | | | | EDSAMYYCARD | EDFASYYCQQ | TYRVVSVLTVLHQDWLNGKEYKCKVSNKALPAPIEKTI | ALQSGNSQESVTEQDSKDS |
| | | | | PVVTEYYYYGM | ANSFPWTFGQ | SKAKGQPREPQVYTLPPSREEMTKNQVSLTCLVKGFYP | TYSLSSTLTLSKADYEKHK |
| | | | | DVWGQGTMVTV | GTKVEIK | SDIAVEWESNGQPENNYKTTPPVLDSDGSFFLYSKLTV | VYACEVTHQGLSSPVTKSF |
| | | | | SS | | DKSRWQQGNVFSCSVMHEALHNHYTQKSLSLSPGK | NRGEC |
| | | | | 609 | 610 | 611 | 612 |
| 19 | VG9B430 | IgG1 | Kappa | EVQLLESGGGL | EIVLTQSPGT | EVQLLESGGGLVKPGGSLRLSCSASGFTFSSYDMNWVR | EIVLTQSPGTLSLSPGDRA |
| | | | | VKPGGSLRLSC | LSLSPGDRAT | QAPGKGLEWVSSISSSSSYIYYADSVKGRFTISRDNAK | TLSCRASQSVASSYLAWYQ |
| | | | | SASGFTFSSYD | LSCRASQSVA | NSLYLQMNSLRAEDTAVYHCARDVGVTTDYYYYGMDVW | QKPGQSPRLLIYGASSRAT |
| | | | | MNWVRQAPGKG | SSYLAWYQQK | GQGTMVTVSSASTKGPSVFPLAPSSKSTSGGTAALGCL | GIPDRFSGSGSGTDFTLTI |
| | | | | LEWVSSISSSS | PGQSPRLLIY | VKDYFPEPVTVSWNSGALTSGVHTFPAVLQSSGLYSLS | SRLEPEDFAVYYCQQYGSS |
| | | | | SYIYYADSVKG | GASSRATGIP | SVVTVPSSSLGTQTYICNVNHKPSNTKVDKKVEPKSCD | PPYTFGQGTKLEIKRTVAA |
| | | | | RFTISRDNAKN | DRFSGSGSGT | KTHTCPPCPAPELLGGPSVFLFPPKPKDTLMISRTPEV | PSVFIFPPSDEQLKSGTAS |
| | | | | SLYLQMNSLRA | DFTLTISRLE | TCVVVDVSHEDPEVKFNWYVDGVEVHNAKTKPREEQYN | VVCLLNNFYPREAKVQWKV |
| | | | | EDTAVYHCARD | PEDFAVYYCQ | STYRVVSVLTVLHQDWLNGKEYKCKVSNKALPAPIEKT | DNALQSGNSQESVTEQDSK |
| | | | | VGVTTDYYYYG | QYGSSPPYTF | ISKAKGQPREPQVYTLPPSREEMTKNQVSLTCLVKGFY | DSTYSLSSTLTLSKADYEK |
| | | | | MDVWGQGTMVT | GQGTKLEIK | PSDIAVEWESNGQPENNYKTTPPVLDSDGSFFLYSKLT | HKVYACEVTHQGLSSPVTK |
| | | | | VSS | | VDKSRWQQGNVFSCSVMHEALHNHYTQKSLSLSPGK | SFNRGEC |
| | | | | 643 | 644 | 645 | 646 |
| 20 | VG9B423 | IgG1 | Kappa | EVQLVESGGGL | ETTLTQSPGT | EVQLVESGGGLVKPGGSLRLSCSASGFTFSNYDMNWVR | ETTLTQSPGTLSLSPGDRA |
| | | | | VKPGGSLRLSC | LSLSPGDRAT | QAPGKGLEWVSSISSSSSYIYYADSVKGRFTISRDNAK | TLSCRASQSVASSYLAWYQ |
| | | | | SASGFTFSNYD | LSCRASQSVA | NSLYLQMNSLRAEDTAVYHCARDVGVTTDYYYYGMDVW | QKPGQSPRLLIYGASSRAT |
| | | | | MNWVRQAPGKG | SSYLAWYQQK | GQGTMVTVSSASTKGPSVFPLAPSSKSTSGGTAALGCL | GIPDRFSGSGSGTDFTLTI |
| | | | | LEWVSSISSSS | PGQSPRLLIY | VKDYFPEPVTVSWNSGALTSGVHTFPAVLQSSGLYSLS | SRLEPEDFAVYYCQQYGSS |
| | | | | SYIYYADSVKG | GASSRATGIP | SVVTVPSSSLGTQTYICNVNHKPSNTKVDKKVEPKSCD | PPYTFGQGTKVEIKRTVAA |
| | | | | RFTISRDNAKN | DRFSGSGSGT | KTHTCPPCPAPELLGGPSVFLFPPKPKDTLMISRTPEV | PSVFIFPPSDEQLKSGTAS |
| | | | | SLYLQMNSLRA | DFTLTISRLE | TCVVVDVSHEDPEVKFNWYVDGVEVHNAKTKPREEQYN | VVCLLNNFYPREAKVQWKV |
| | | | | EDTAVYHCARD | PEDFAVYYCQ | STYRVVSVLTVLHQDWLNGKEYKCKVSNKALPAPIEKT | DNALQSGNSQESVTEQDSK |
| | | | | VGVTTDYYYYG | QYGSSPPYTF | ISKAKGQPREPQVYTLPPSREEMTKNQVSLTCLVKGFY | DSTYSLSSTLTLSKADYEK |
| | | | | MDVWGQGTMVT | GQGTKVEIK | PSDIAVEWESNGQPENNYKTTPPVLDSDGSFFLYSKLT | HKVYACEVTHQGLSSPVTK |
| | | | | VSS | | VDKSRWQQGNVFSCSVMHEALHNHYTQKSLSLSPGK | SFNRGEC |
| | | | | 677 | 678 | 679 | 680 |
| 21 | VG9B98 | IgG1 | Kappa | EVQLVQSGGDL | EIVLTQSPGT | EVQLVQSGGDLVKSGGSLRLSCAASGFTFSSYSMYWVR | EIVLTQSPGTLSLSPGERA |
| | | | | VKSGGSLRLSC | LSLSPGERAT | QAPGKGLEWVSSIGSSSTYIFYADSVKGRFTISRDNAM | TLSCRASQSVSTSYLAWFQ |
| | | | | AASGFTFSSYS | LSCRASQSVS | TSLYLQMNRLGAEDSAVYYCARDGELGPFEYWGQGTLV | QKPGQAPRLLIFGTSSRAT |
| | | | | MYWVRQAPGKG | TSYLAWFQQK | TVSSASTKGPSVFPLAPSSKSTSGGTAALGCLVKDYFP | GIPDRFSGSGSGTDFTLTI |
| | | | | LEWVSSIGSSS | PGQAPRLLIF | EPVTVSWNSGALTSGVHTFPAVLQSSGLYSLSSVVTVP | SRLEPEDFAVYHCLQYGRS |
| | | | | TYIFYADSVKG | GTSSRATGIP | SSSLGTQTYICNVNHKPSNTKVDKKVEPKSCDKTHTCP | PLTFGGGTKVDIKRTVAAP |
| | | | | RFTISRDNAMT | DRFSGSGSGT | PCPAPELLGGPSVFLFPPKPKDTLMISRTPEVTCVVVD | SVFIFPPSDEQLKSGTASV |
| | | | | SLYLQMNRLGA | DFTLTISRLE | VSHEDPEVKFNWYVDGVEVHNAKTKPREEQYNSTYRVV | VCLLNNFYPREAKVQWKVD |
| | | | | EDSAVYYCARD | PEDFAVYHCL | SVLTVLHQDWLNGKEYKCKVSNKALPAPIEKTISKAKG | NALQSGNSQESVTEQDSKD |
| | | | | GELGPFEYWGQ | QYGRSPLTFG | QPREPQVYTLPPSREEMTKNQVSLTCLVKGFYPSDIAV | STYSLSSTLTLSKADYEKH |
| | | | | GTLVTVSS | GGTKVDIK | EWESNGQPENNYKTTPPVLDSDGSFFLYSKLTVDKSRW | KVYACEVTHQGLSSPVTKS |
| | | | | | | QQGNVFSCSVMHEALHNHYTQKSLSLSPGK | FNRGEC |
| | | | | 711 | 712 | 713 | 714 |
| 22 | VG9B73 | IgG1 | Kappa | EVQLVQSGGGL | EIVMTQSPGT | EVQLVQSGGGLVKPGGSLRLSCAASGFTFSNYDMNWVR | EIVMTQSPGTLSLSPGERA |
| | | | | VKPGGSLRLSC | LSLSPGERAT | QAPGKGLEWVSSISSSSSYIYYADSVKGRFTISRDNAR | TLSCRASQSFSSNYLAWYQ |
| | | | | AASGFTFSNYD | LSCRASQSFS | NSLFLQMSSLRAEDTAVYYCAREIGVTGTTYYQDYGMD | QKPGQAPRLLIYGASSRAT |
| | | | | MNWVRQAPGKG | SNYLAWYQQK | VWGQGTTVTVSSASTKGPSVFPLAPSSKSTSGGTAALG | GIPDRFSGSGSGTDFTLTI |
| | | | | LEWVSSISSSS | PGQAPRLLIY | CLVKDYFPEPVTVSWNSGALTSGVHTFPAVLQSSGLYS | SRLEPEDFALYYCQQYGSS |
| | | | | SYIYYADSVKG | GASSRATGIP | LSSVVTVPSSSLGTQTYICNVNHKPSNTKVDKKVEPKS | PPFTFGQGTKVEIKRTVAA |
| | | | | RFTISRDNARN | DRFSGSGSGT | CDKTHTCPPCPAPELLGGPSVFLFPPKPKDTLMISRTP | PSVFIFPPSDEQLKSGTAS |
| | | | | SLFLQMSSLRA | DFTLTISRLE | EVTCVVVDVSHEDPEVKFNWYVDGVEVHNAKTKPREEQ | VVCLLNNFYPREAKVQWKV |
| | | | | EDTAVYYCARE | PEDFALYYCQ | YNSTYRVVSVLTVLHQDWLNGKEYKCKVSNKALPAPIE | DNALQSGNSQESVTEQDSK |
| | | | | IGVTGTTYYQD | QYGSSPPFTF | KTISKAKGQPREPQVYTLPPSREEMTKNQVSLTCLVKG | DSTYSLSSTLTLSKADYEK |
| | | | | YGMDVWGQGTT | GQGTKVEIK | FYPSDIAVEWESNGQPENNYKTTPPVLDSDGSFFLYSK | HKVYACEVTHQGLSSPVTK |
| | | | | VTVSS | | LTVDKSRWQQGNVFSCSVMHEALHNHYTQKSLSLSPGK | SFNRGEC |
| | | | | 745 | 746 | 747 | 748 |
| 23 | VG9B133 | IgG1 | Kappa | EVQLVESGGGL | EIVMTQSPGT | EVQLVESGGGLVKPGGSLRLSCAAAGFTFSNYDMNWVR | EIVMTQSPGTLSLSPGERA |
| | | | | VKPGGSLRLSC | LSLSPGERAT | QVPGKGLEWVSSISSSSSYIYYADSVKGRFTISRDNAK | TLSCRASQSVSSSYLAWYQ |
| | | | | AAAGFTFSNYD | LSCRASQSVS | NSLYLQMNTLRAEDTAVYYCARDLGITGTTMDYYYGMD | QKPGQAPRLLIYGASSRAT |
| | | | | MNWVRQVPGKG | SSYLAWYQQK | VWGQGTMVTVSSASTKGPSVFPLAPSSKSTSGGTAALG | GIPDRFSGSGSGTDFTLTI |
| | | | | LEWVSSISSSS | PGQAPRLLIY | CLVKDYFPEPVTVSWNSGALTSGVHTFPAVLQSSGLYS | SRLEPEDFAVYYCQQYGSS |
| | | | | SYIYYADSVKG | GASSRATGIP | LSSVVTVPSSSLGTQTYICNVNHKPSNTKVDKKVEPKS | PPYTFGQGTKVDIKRTVAA |
| | | | | RFTISRDNAKN | DRFSGSGSGT | CDKTHTCPPCPAPELLGGPSVFLFPPKPKDTLMISRTP | PSVFIFPPSDEQLKSGTAS |
| | | | | SLYLQMNTLRA | DFTLTISRLE | EVTCVVVDVSHEDPEVKFNWYVDGVEVHNAKTKPREEQ | VVCLLNNFYPREAKVQWKV |
| | | | | EDTAVYYCARD | PEDFAVYYCQ | YNSTYRVVSVLTVLHQDWLNGKEYKCKVSNKALPAPIE | DNALQSGNSQESVTEQDSK |
| | | | | LGITGTTMDYY | QYGSSPPYTF | KTISKAKGQPREPQVYTLPPSREEMTKNQVSLTCLVKG | DSTYSLSSTLTLSKADYEK |
| | | | | YGMDVWGQGTM | GQGTKVDIK | FYPSDIAVEWESNGQPENNYKTTPPVLDSDGSFFLYSK | HKVYACEVTHQGLSSPVTK |
| | | | | VTVSS | | LTVDKSRWQQGNVFSCSVMHEALHNHYTQKSLSLSPGK | SFNRGEC |
| | | | | 779 | 780 | 781 | 782 |
| 24 | VG9B368 | IgG1 | Kappa | EVQLVESGGGL | EIVLTQSPGT | EVQLVESGGGLVKPGGSLRLSCAASGFTFNSYDMNWVR | EIVLTQSPGTLSLSPGERA |
| | | | | VKPGGSLRLSC | LSLSPGERAT | QAPGKGLEWVSSISSSSSYIYYADSVKGRCTISRDNAR | TLSCRASQSVSSSYLAWYQ |
| | | | | AASGFTFNSYD | LSCRASQSVS | NSLYLQMNSLRAEDTAIYYCARDRGIGGDYYSYAMDVW | QKPGQAPRLLIYGASSRAT |
| | | | | MNWVRQAPGKG | SSYLAWYQQK | GQGTMVTVSSASTKGPSVFPLAPSSKSTSGGTAALGCL | GIPDRFSGSGSGTDFTLTI |
| | | | | LEWVSSISSSS | PGQAPRLLIY | VKDYFPEPVTVSWNSGALTSGVHTFPAVLQSSGLYSLS | SRLEPEDFAVYYCQQYGSS |
| | | | | SYIYYADSVKG | GASSRATGIP | SVVTVPSSSLGTQTYICNVNHKPSNTKVDKKVEPKSCD | PPYTFGQGTKLEIKRTVAA |
| | | | | RCTISRDNARN | DRFSGSGSGT | KTHTCPPCPAPELLGGPSVFLFPPKPKDTLMISRTPEV | PSVFIFPPSDEQLKSGTAS |
| | | | | SLYLQMNSLRA | DFTLTISRLE | TCVVVDVSHEDPEVKFNWYVDGVEVHNAKTKPREEQYN | VVCLLNNFYPREAKVQWKV |
| | | | | EDTAIYYCARD | PEDFAVYYCQ | STYRVVSVLTVLHQDWLNGKEYKCKVSNKALPAPIEKT | DNALQSGNSQESVTEQDSK |
| | | | | RGIGGDYYSYA | QYGSSPPYTF | ISKAKGQPREPQVYTLPPSREEMTKNQVSLTCLVKGFY | DSTYSLSSTLTLSKADYEK |
| | | | | MDVWGQGTMVT | GQGTKLEIK | PSDIAVEWESNGQPENNYKTTPPVLDSDGSFFLYSKLT | HKVYACEVTHQGLSSPVTK |
| | | | | VSS | | VDKSRWQQGNVFSCSVMHEALHNHYTQKSLSLSPGK | SFNRGEC |
| | | | | 813 | 814 | 815 | 816 |
| 25 | VG9B424 | IgG1 | Kappa | EVQLVESGGGL | ETTLTQSPGT | EVQLVESGGGLVKPGGSLRLSCSASGFTFSNYDMNWVR | ETTLTQSPGTLSLSPGDRA |
| | | | | VKPGGSLRLSC | LSLSPGDRAT | QAPGKGLEWVSSISSSSSYIYYADSVKGRFTISRDNAK | TLSCRASQSVASSYLAWYQ |
| | | | | SASGFTFSNYD | LSCRASQSVA | NSLYLQMNSLRAEDTAVYHCARDVGVTTDYYYYGMDVW | QKPGQSPRLLIYGASSRAT |
| | | | | MNWVRQAPGKG | SSYLAWYQQK | GQGTMVTVSSASTKGPSVFPLAPSSKSTSGGTAALGCL | GIPDRFSGSGSGTDFTLTI |
| | | | | LEWVSSISSSS | PGQSPRLLIY | VKDYFPEPVTVSWNSGALTSGVHTFPAVLQSSGLYSLS | SRLEPEDFAVYYCQQYGSS |
| | | | | SYIYYADSVKG | GASSRATGIP | SVVTVPSSSLGTQTYICNVNHKPSNTKVDKKVEPKSCD | PPYTFGQGTKLEIKRTVAA |
| | | | | RFTISRDNAKN | DRFSGSGSGT | KTHTCPPCPAPELLGGPSVFLFPPKPKDTLMISRTPEV | PSVFIFPPSDEQLKSGTAS |
| | | | | SLYLQMNSLRA | DFTLTISRLE | TCVVVDVSHEDPEVKFNWYVDGVEVHNAKTKPREEQYN | VVCLLNNFYPREAKVQWKV |
| | | | | EDTAVYHCARD | PEDFAVYYCQ | STYRVVSVLTVLHQDWLNGKEYKCKVSNKALPAPIEKT | DNALQSGNSQESVTEQDSK |
| | | | | VGVTTDYYYYG | QYGSSPPYTF | ISKAKGQPREPQVYTLPPSREEMTKNQVSLTCLVKGFY | DSTYSLSSTLTLSKADYEK |
| | | | | MDVWGQGTMVT | GQGTKLEIK | PSDIAVEWESNGQPENNYKTTPPVLDSDGSFFLYSKLT | HKVYACEVTHQGLSSPVTK |
| | | | | VSS | | VDKSRWQQGNVFSCSVMHEALHNHYTQKSLSLSPGK | SFNRGEC |
| | | | | 847 | 848 | 849 | 850 |
| 26 | VG9B427 | IgG1 | Kappa | QVQLVESGGGL | EIVMTQSPGT | QVQLVESGGGLVKPGGSLRLSCSASGFTFSNYDMNWVR | EIVMTQSPGTLSLSPGDRA |
| | | | | VKPGGSLRLSC | LSLSPGDRAT | QAPGKGLEWVSSISSSSSYIYYADSVKGRFTISRDNAK | TLSCRASQSVASSYLAWYQ |
| | | | | SASGFTFSNYD | LSCRASQSVA | NSLYLQMNSLRAEDTAVYHCARDVGVTTDYYYYGMDVW | QKPGQSPRLLIYGASSRAT |
| | | | | MNWVRQAPGKG | SSYLAWYQQK | GQGTTVTVSSASTKGPSVFPLAPSSKSTSGGTAALGCL | GIPDRFSGSGSGTDFTLTI |
| | | | | LEWVSSISSSS | PGQSPRLLIY | VKDYFPEPVTVSWNSGALTSGVHTFPAVLQSSGLYSLS | SRLEPEDFAVYYCQQYGSS |
| | | | | SYIYYADSVKG | GASSRATGIP | SVVTVPSSSLGTQTYICNVNHKPSNTKVDKKVEPKSCD | PPYTFGQGTRLEIKRTVAA |
| | | | | RFTISRDNAKN | DRFSGSGSGT | KTHTCPPCPAPELLGGPSVFLFPPKPKDTLMISRTPEV | PSVFIFPPSDEQLKSGTAS |
| | | | | SLYLQMNSLRA | DFTLTISRLE | TCVVVDVSHEDPEVKFNWYVDGVEVHNAKTKPREEQYN | VVCLLNNFYPREAKVQWKV |
| | | | | EDTAVYHCARD | PEDFAVYYCQ | STYRVVSVLTVLHQDWLNGKEYKCKVSNKALPAPIEKT | DNALQSGNSQESVTEQDSK |
| | | | | VGVTTDYYYYG | QYGSSPPYTF | ISKAKGQPREPQVYTLPPSREEMTKNQVSLTCLVKGFY | DSTYSLSSTLTLSKADYEK |
| | | | | MDVWGQGTTVT | GQGTRLEIK | PSDIAVEWESNGQPENNYKTTPPVLDSDGSFFLYSKLT | HKVYACEVTHQGLSSPVTK |
| | | | | VSS | | VDKSRWQQGNVFSCSVMHEALHNHYTQKSLSLSPGK | SFNRGEC |
| | | | | 881 | 882 | 883 | 884 |
| 27 | VG9B417 | IgG1 | Kappa | EVQLVESGGGL | DIVMTQSPSS | EVQLVESGGGLVKPGGSLRLSCAASGFTFSNYGMNWVR | DIVMTQSPSSVSASVGDRV |
| | | | | VKPGGSLRLSC | VSASVGDRVT | QAPGKGLEWVSYISSGSSYKYYADSMKGRFTISRDNAM | TITCRASQGINSWLAWYQQ |
| | | | | AASGFTFSNYG | ITCRASQGIN | NLLYLQMNSLRPEDSAMYYCARDPVVTEYYYYGMDVWG | KPGNAPKLLIYAASSLQSG |
| | | | | MNWVRQAPGKG | SWLAWYQQKP | QGTTVTVSSASTKGPSVFPLAPSSKSTSGGTAALGCLV | VPSRFSGIGSGTDFIFTIS |
| | | | | LEWVSYISSGS | GNAPKLLIYA | KDYFPEPVTVSWNSGALTSGVHTFPAVLQSSGLYSLSS | SLQPEDFASYYCQQANSFP |
| | | | | SYKYYADSMKG | ASSLQSGVPS | VVTVPSSSLGTQTYICNVNHKPSNTKVDKKVEPKSCDK | WTFGQGTKVEIKRTVAAPS |
| | | | | RFTISRDNAMN | RFSGIGSGTD | THTCPPCPAPELLGGPSVFLFPPKPKDTLMISRTPEVT | VFIFPPSDEQLKSGTASVV |
| | | | | LLYLQMNSLRP | FIFTISSLQP | CVVVDVSHEDPEVKFNWYVDGVEVHNAKTKPREEQYNS | CLLNNFYPREAKVQWKVDN |
| | | | | EDSAMYYCARD | EDFASYYCQQ | TYRVVSVLTVLHQDWLNGKEYKCKVSNKALPAPIEKTI | ALQSGNSQESVTEQDSKDS |
| | | | | PVVTEYYYYGM | ANSFPWTFGQ | SKAKGQPREPQVYTLPPSREEMTKNQVSLTCLVKGFYP | TYSLSSTLTLSKADYEKHK |
| | | | | DVWGQGTTVTV | GTKVEIK | SDIAVEWESNGQPENNYKTTPPVLDSDGSFFLYSKLTV | VYACEVTHQGLSSPVTKSF |
| | | | | SS | | DKSRWQQGNVFSCSVMHEALHNHYTQKSLSLSPGK | NRGEC |
| | | | | 915 | 916 | 917 | 918 |
| 28 | VG9B58 | IgG1 | Kappa | QVQLQESGPGL | DIQMTQSPSA | QVQLQESGPGLVKPSETLSLTCTVSGGSIKSSYWTWIR | DIQMTQSPSAMSASVGDRV |
| | | | | VKPSETLSLTC | MSASVGDRVT | QPPGKGLEWIGYMFYLGSTNYNPSLKSRVTMSIDTSRN | TITCRASQDITNYLAWFQQ |
| | | | | TVSGGSIKSSY | ITCRASQDIT | QFSLKLSSVTAADTAVYYCSRERPVLDAFDIWGQGTMV | KPGKVPKRLIYAASSLQGG |
| | | | | WTWIRQPPGKG | NYLAWFQQKP | TVSSASTKGPSVFPLAPSSKSTSGGTAALGCLVKDYFP | VPSRFSGSGSGTEFTLTIS |
| | | | | LEWIGYMFYLG | GKVPKRLIYA | EPVTVSWNSGALTSGVHTFPAVLQSSGLYSLSSVVTVP | SLQPEDFSTYYCLQHDTYP |
| | | | | STNYNPSLKSR | ASSLQGGVPS | SSSLGTQTYICNVNHKPSNTKVDKKVEPKSCDKTHTCP | YTFGQGTKVDIKRTVAAPS |
| | | | | VTMSIDTSRNQ | RFSGSGSGTE | PCPAPELLGGPSVFLFPPKPKDTLMISRTPEVTCVVVD | VFIFPPSDEQLKSGTASVV |
| | | | | FSLKLSSVTAA | FTLTISSLQP | VSHEDPEVKFNWYVDGVEVHNAKTKPREEQYNSTYRVV | CLLNNFYPREAKVQWKVDN |
| | | | | DTAVYYCSRER | EDFSTYYCLQ | SVLTVLHQDWLNGKEYKCKVSNKALPAPIEKTISKAKG | ALQSGNSQESVTEQDSKDS |
| | | | | PVLDAFDIWGQ | HDTYPYTFGQ | QPREPQVYTLPPSREEMTKNQVSLTCLVKGFYPSDIAV | TYSLSSTLTLSKADYEKHK |
| | | | | GTMVTVSS | GTKVDIK | EWESNGQPENNYKTTPPVLDSDGSFFLYSKLTVDKSRW | VYACEVTHQGLSSPVTKSF |
| | | | | | | QQGNVFSCSVMHEALHNHYTQKSLSLSPGK | NRGEC |
| | | | | 949 | 950 | 951 | 952 |
| 29 | VG9B419 | IgG1 | Kappa | EVQLVESGGGL | EIVLTQSPGT | EVQLVESGGGLVKPGGSLRLSCSASGFTFSNYDMNWVR | EIVLTQSPGTLSLSPGDRA |
| | | | | VKPGGSLRLSC | LSLSPGDRAT | QAPGKGLEWVSSISSSSSYIYYADSVKGRFTISRDNAK | TLSCRASQSVASSYLAWYQ |
| | | | | SASGFTFSNYD | LSCRASQSVA | NSLYLQMNSLRAEDTAVYHCARDVGVTTDYYYYGMDVW | QKPGQSPRLLIYGASSRAT |
| | | | | MNWVRQAPGKG | SSYLAWYQQK | GQGTTVTVSSASTKGPSVFPLAPSSKSTSGGTAALGCL | GIPDRFSGSGSGTDFTLTI |
| | | | | LEWVSSISSSS | PGQSPRLLIY | VKDYFPEPVTVSWNSGALTSGVHTFPAVLQSSGLYSLS | SRLEPEDFAVYYCQQYGSS |
| | | | | SYIYYADSVKG | GASSRATGIP | SVVTVPSSSLGTQTYICNVNHKPSNTKVDKKVEPKSCD | PPYTFGQGTKVEIKRTVAA |
| | | | | RFTISRDNAKN | DRFSGSGSGT | KTHTCPPCPAPELLGGPSVFLFPPKPKDTLMISRTPEV | PSVFIFPPSDEQLKSGTAS |
| | | | | SLYLQMNSLRA | DFTLTISRLE | TCVVVDVSHEDPEVKFNWYVDGVEVHNAKTKPREEQYN | VVCLLNNFYPREAKVQWKV |
| | | | | EDTAVYHCARD | PEDFAVYYCQ | STYRVVSVLTVLHQDWLNGKEYKCKVSNKALPAPIEKT | DNALQSGNSQESVTEQDSK |
| | | | | VGVTTDYYYYG | QYGSSPPYTF | ISKAKGQPREPQVYTLPPSREEMTKNQVSLTCLVKGFY | DSTYSLSSTLTLSKADYEK |
| | | | | MDVWGQGTTVT | GQGTKVEIK | PSDIAVEWESNGQPENNYKTTPPVLDSDGSFFLYSKLT | HKVYACEVTHQGLSSPVTK |
| | | | | VSS | | VDKSRWQQGNVFSCSVMHEALHNHYTQKSLSLSPGK | SFNRGEC |
| | | | | 983 | 984 | 985 | 986 |
| 30 | VG9B425 | IgG1 | Kappa | EVQLLESGGGL | ETTLTQSPGT | EVQLLESGGGLVKPGGSLRLSCSASGFTFSNYDMNWVR | ETTLTQSPGTLSLSPGDRA |
| | | | | VKPGGSLRLSC | LSLSPGDRAT | QAPGKGLEWVSSISSSSSYIYYADSVKGRFTISRDNAK | TLSCRASQSVASSYLAWYQ |
| | | | | SASGFTFSNYD | LSCRASQSVA | NSLYLQMNSLRAEDTAVYHCARDVGVTTDYYYYGMDVW | QKPGQSPRLLIYGASSRAT |
| | | | | MNWVRQAPGKG | SSYLAWYQQK | GQGTMVTVSSASTKGPSVFPLAPSSKSTSGGTAALGCL | GIPDRFSGSGSGTDFTLTI |
| | | | | LEWVSSISSSS | PGQSPRLLIY | VKDYFPEPVTVSWNSGALTSGVHTFPAVLQSSGLYSLS | SRLEPEDFAVYYCQQYGSS |
| | | | | SYIYYADSVKG | GASSRATGIP | SVVTVPSSSLGTQTYICNVNHKPSNTKVDKKVEPKSCD | PPYTFGQGTKVEIKRTVAA |
| | | | | RFTISRDNAKN | DRFSGSGSGT | KTHTCPPCPAPELLGGPSVFLFPPKPKDTLMISRTPEV | PSVFIFPPSDEQLKSGTAS |
| | | | | SLYLQMNSLRA | DFTLTISRLE | TCVVVDVSHEDPEVKFNWYVDGVEVHNAKTKPREEQYN | VVCLLNNFYPREAKVQWKV |
| | | | | EDTAVYHCARD | PEDFAVYYCQ | STYRVVSVLTVLHQDWLNGKEYKCKVSNKALPAPIEKT | DNALQSGNSQESVTEQDSK |
| | | | | VGVTTDYYYYG | QYGSSPPYTF | ISKAKGQPREPQVYTLPPSREEMTKNQVSLTCLVKGFY | DSTYSLSSTLTLSKADYEK |
| | | | | MDVWGQGTMVT | GQGTKVEIK | PSDIAVEWESNGQPENNYKTTPPVLDSDGSFFLYSKLT | HKVYACEVTHQGLSSPVTK |
| | | | | VSS | | VDKSRWQQGNVFSCSVMHEALHNHYTQKSLSLSPGK | SFNRGEC |
| | | | | 1017 | 1018 | 1019 | 1020 |
| 31 | VG9B143 | IgG1 | Lambda | EVQLVESGGGL | QSALTQPASV | EVQLVESGGGLVQPGGSLRLSCAASGFTFSTYGMNWVR | QSALTQPASVSGSPGQSIT |
| | | | | VQPGGSLRLSC | SGSPGQSITI | QAPGKGLEWISYISTSSYTIYYSDSVKGRFTVSRDNAK | ISCTGTSSDVGGYNYVSWY |
| | | | | AASGFTFSTYG | SCTGTSSDVG | NSLYLQMNSLRDEDTAVYYCAREGDWWYFDLWGRGTTV | QQHPGKAPKLMIYEVSNRP |
| | | | | MNWVRQAPGKG | GYNYVSWYQQ | TVSSASTKGPSVFPLAPSSKSTSGGTAALGCLVKDYFP | SGVSYRFSGSKSGNTASLT |
| | | | | LEWISYISTSS | HPGKAPKLMI | EPVTVSWNSGALTSGVHTFPAVLQSSGLYSLSSVVTVP | ISGLQAEDEADYYCSSYTS |
| | | | | YTIYYSDSVKG | YEVSNRPSGV | SSSLGTQTYICNVNHKPSNTKVDKKVEPKSCDKTHTCP | SSTLVFGGGTKLTVLGQPK |
| | | | | RFTVSRDNAKN | SYRFSGSKSG | PCPAPELLGGPSVFLFPPKPKDTLMISRTPEVTCVVVD | AAPSVTLFPPSSEELQANK |
| | | | | SLYLQMNSLRD | NTASLTISGL | VSHEDPEVKFNWYVDGVEVHNAKTKPREEQYNSTYRVV | ATLVCLISDFYPGAVTVAW |
| | | | | EDTAVYYCARE | QAEDEADYYC | SVLTVLHQDWLNGKEYKCKVSNKALPAPIEKTISKAKG | KADSSPVKAGVETTTPSKQ |
| | | | | GDWWYFDLWGR | SSYTSSSTLV | QPREPQVYTLPPSREEMTKNQVSLTCLVKGFYPSDIAV | SNNKYAASSYLSLTPEQWK |
| | | | | GTTVTVSS | FGGGTKLTVL | EWESNGQPENNYKTTPPVLDSDGSFFLYSKLTVDKSRW | SHRSYSCQVTHEGSTVEKT |
| | | | | | | QQGNVFSCSVMHEALHNHYTQKSLSLSPGK | VAPTECS |
| | | | | 1051 | 1052 | 1053 | 1054 |
| 32 | VG9B418 | IgG1 | Kappa | EVQLVQSGGGL | EIVLTQSPGT | EVQLVQSGGGLVKPGGSLRLSCSASGFTFSNYDMNWVR | EIVLTQSPGTLSLSPGDRA |
| | | | | VKPGGSLRLSC | LSLSPGDRAT | QAPGKGLEWVSSISSSSSYIYYADSVKGRFTISRDNAK | TLSCRASQSVASSYLAWYQ |
| | | | | SASGFTFSNYD | LSCRASQSVA | NSLYLQMNSLRAEDTAVYHCARDVGVTTDYYYYGMDVW | QKPGQSPRLLIYGASSRAT |
| | | | | MNWVRQAPGKG | SSYLAWYQQK | GQGTMVTVSSASTKGPSVFPLAPSSKSTSGGTAALGCL | GIPDRFSGSGSGTDFTLTI |
| | | | | LEWVSSISSSS | PGQSPRLLIY | VKDYFPEPVTVSWNSGALTSGVHTFPAVLQSSGLYSLS | SRLEPEDFAVYYCQQYGSS |
| | | | | SYIYYADSVKG | GASSRATGIP | SVVTVPSSSLGTQTYICNVNHKPSNTKVDKKVEPKSCD | PPYTFGQGTKLEIKRTVAA |
| | | | | RFTISRDNAKN | DRFSGSGSGT | KTHTCPPCPAPELLGGPSVFLFPPKPKDTLMISRTPEV | PSVFIFPPSDEQLKSGTAS |
| | | | | SLYLQMNSLRA | DFTLTISRLE | TCVVVDVSHEDPEVKFNWYVDGVEVHNAKTKPREEQYN | VVCLLNNFYPREAKVQWKV |
| | | | | EDTAVYHCARD | PEDFAVYYCQ | STYRVVSVLTVLHQDWLNGKEYKCKVSNKALPAPIEKT | DNALQSGNSQESVTEQDSK |
| | | | | VGVTTDYYYYG | QYGSSPPYTF | ISKAKGQPREPQVYTLPPSREEMTKNQVSLTCLVKGFY | DSTYSLSSTLTLSKADYEK |
| | | | | MDVWGQGTMVT | GQGTKLEIK | PSDIAVEWESNGQPENNYKTTPPVLDSDGSFFLYSKLT | HKVYACEVTHQGLSSPVTK |
| | | | | VSS | | VDKSRWQQGNVFSCSVMHEALHNHYTQKSLSLSPGK | SFNRGEC |
| | | | | 1085 | 1086 | 1087 | 1088 |
| 33 | VG9B472 | IgG1 | Kappa | QVQLVESGGGL | EIVLTQSPSS | QVQLVESGGGLVKPGGSLRLSCAASGFTFSHYDMNWVR | EIVLTQSPSSLSASVGDRV |
| | | | | VKPGGSLRLSC | LSASVGDRVT | QAPGKGLEWVSSISSSSSYIFYADSVKGRFTISRDNAK | TITCRASQGIATYLAWYQQ |
| | | | | AASGFTFSHYD | ITCRASQGIA | NSLLLQMNSLRAEDTAVYHCARDRGVGDTSDYYSFGLD | KPGKVPNLLIYAASTLQSG |
| | | | | MNWVRQAPGKG | TYLAWYQQKP | VWGQGTTVTVSSASTKGPSVFPLAPSSKSTSGGTAALG | VPSRFSGSGSGTDFTLTIS |
| | | | | LEWVSSISSSS | GKVPNLLIYA | CLVKDYFPEPVTVSWNSGALTSGVHTFPAVLQSSGLYS | SLQPEDVATYYCQKYNSAP |
| | | | | SYIFYADSVKG | ASTLQSGVPS | LSSVVTVPSSSLGTQTYICNVNHKPSNTKVDKKVEPKS | PWTFGQGTKVEIKRTVAAP |
| | | | | RFTISRDNAKN | RFSGSGSGTD | CDKTHTCPPCPAPELLGGPSVFLFPPKPKDTLMISRTP | SVFIFPPSDEQLKSGTASV |
| | | | | SLLLQMNSLRA | FTLTISSLQP | EVTCVVVDVSHEDPEVKFNWYVDGVEVHNAKTKPREEQ | VCLLNNFYPREAKVQWKVD |
| | | | | EDTAVYHCARD | EDVATYYCQK | YNSTYRVVSVLTVLHQDWLNGKEYKCKVSNKALPAPIE | NALQSGNSQESVTEQDSKD |
| | | | | RGVGDTSDYYS | YNSAPPWTFG | KTISKAKGQPREPQVYTLPPSREEMTKNQVSLTCLVKG | STYSLSSTLTLSKADYEKH |
| | | | | FGLDVWGQGTT | QGTKVEIK | FYPSDIAVEWESNGQPENNYKTTPPVLDSDGSFFLYSK | KVYACEVTHQGLSSPVTKS |
| | | | | VTVSS | | LTVDKSRWQQGNVFSCSVMHEALHNHYTQKSLSLSPGK | FNRGEC |
| | | | | 1119 | 1120 | 1121 | 1122 |
| 34 | VG9B421 | IgG1 | Kappa | EVQLVESGGGL | DIQMTQSPSS | EVQLVESGGGLVKPGGSLRLSCAASGFTFSNYGMNWVR | DIQMTQSPSSVSASVGDRV |
| | | | | VKPGGSLRLSC | VSASVGDRVT | QAPGKGLEWVSYISSGSSYKYYADSMKGRFTISRDNAM | TITCRASQGINSWLAWYQQ |
| | | | | AASGFTFSNYG | ITCRASQGIN | NLLYLQMNSLRPEDSAMYYCARDPVVTEYYYYGMDVWG | KPGNAPKLLIYAASSLQSG |
| | | | | MNWVRQAPGKG | SWLAWYQQKP | QGTMVTVSSASTKGPSVFPLAPSSKSTSGGTAALGCLV | VPSRFSGIGSGTDFIFTIS |
| | | | | LEWVSYISSGS | GNAPKLLIYA | KDYFPEPVTVSWNSGALTSGVHTFPAVLQSSGLYSLSS | SLQPEDFASYYCQQANSFP |
| | | | | SYKYYADSMKG | ASSLQSGVPS | VVTVPSSSLGTQTYICNVNHKPSNTKVDKKVEPKSCDK | WTFGQGTRLEIKRTVAAPS |
| | | | | RFTISRDNAMN | RFSGIGSGTD | THTCPPCPAPELLGGPSVFLFPPKPKDTLMISRTPEVT | VFIFPPSDEQLKSGTASVV |
| | | | | LLYLQMNSLRP | FIFTISSLQP | CVVVDVSHEDPEVKFNWYVDGVEVHNAKTKPREEQYNS | CLLNNFYPREAKVQWKVDN |
| | | | | EDSAMYYCARD | EDFASYYCQQ | TYRVVSVLTVLHQDWLNGKEYKCKVSNKALPAPIEKTI | ALQSGNSQESVTEQDSKDS |
| | | | | PVVTEYYYYGM | ANSFPWTFGQ | SKAKGQPREPQVYTLPPSREEMTKNQVSLTCLVKGFYP | TYSLSSTLTLSKADYEKHK |
| | | | | DVWGQGTMVTV | GTRLEIK | SDIAVEWESNGQPENNYKTTPPVLDSDGSFFLYSKLTV | VYACEVTHQGLSSPVTKSF |
| | | | | SS | | DKSRWQQGNVFSCSVMHEALHNHYTQKSLSLSPGK | NRGEC |
| | | | | 1153 | 1154 | 1155 | 1156 |
| 35 | VG9B88 | IgG1 | Kappa | EVQLVESGGGL | EIVLTQSPLS | EVQLVESGGGLVKPGGSLRLSCAVSGFTFSSYTMNWVR | EIVLTQSPLSLPVTPGEPA |
| | | | | VKPGGSLRLSC | LPVTPGEPAS | QAPGKGLEWVSSISTSSSYIDYADSVKGRFTISRDNAK | SISCRSSQSLLNSDDGNTY |
| | | | | AVSGFTFSSYT | ISCRSSQSLL | KSLYLQMNSLRAEDTAVYYCARDGDMVAPIKGSFDYWG | LDWYLQKPGQSPQLLIYTL |
| | | | | MNWVRQAPGKG | NSDDGNTYLD | QGTLVTVSSASTKGPSVFPLAPSSKSTSGGTAALGCLV | SYRASGVPDRFSGSGSGTD |
| | | | | LEWVSSISTSS | WYLQKPGQSP | KDYFPEPVTVSWNSGALTSGVHTFPAVLQSSGLYSLSS | FTLKISRVEAEDVGVYYCM |
| | | | | SYIDYADSVKG | QLLIYTLSYR | VVTVPSSSLGTQTYICNVNHKPSNTKVDKKVEPKSCDK | QRIEFPITFGQGTRLEIKR |
| | | | | RFTISRDNAKK | ASGVPDRFSG | THTCPPCPAPELLGGPSVFLFPPKPKDTLMISRTPEVT | TVAAPSVFIFPPSDEQLKS |
| | | | | SLYLQMNSLRA | SGSGTDFTLK | CVVVDVSHEDPEVKFNWYVDGVEVHNAKTKPREEQYNS | GTASVVCLLNNFYPREAKV |
| | | | | EDTAVYYCARD | ISRVEAEDVG | TYRVVSVLTVLHQDWLNGKEYKCKVSNKALPAPIEKTI | QWKVDNALQSGNSQESVTE |
| | | | | GDMVAPIKGSF | VYYCMQRIEF | SKAKGQPREPQVYTLPPSREEMTKNQVSLTCLVKGFYP | QDSKDSTYSLSSTLTLSKA |
| | | | | DYWGQGTLVTV | PITFGQGTRL | SDIAVEWESNGQPENNYKTTPPVLDSDGSFFLYSKLTV | DYEKHKVYACEVTHQGLSS |
| | | | | SS | EIK | DKSRWQQGNVFSCSVMHEALHNHYTQKSLSLSPGK | PVTKSFNRGEC |
| | | | | 1187 | 1188 | 1189 | 1190 |
| 36 | VG9B384 | IgG1 | Lambda | QVQLQESGPAL | SYELMQPPSV | QVQLQESGPALVKPTQTLTLTCTFSGFSLSSSGMCVSW | SYELMQPPSVSVSPGQTAS |
| | | | | VKPTQTLTLTC | SVSPGQTASI | IRQPPGKALEWLTLIDWFDDKYYSTSLKTRLTISKDTS | ITCSGNELGDKYASWYQQQ |
| | | | | TFSGFSLSSSG | TCSGNELGDK | KNQVVLTMTNMDPVDTATYYCARIRGTGAYYYGLDVWG | PGQSPVLVIYQDNKRPSGI |
| | | | | MCVSWIRQPPG | YASWYQQQPG | QGTMVTVSSASTKGPSVFPLAPSSKSTSGGTAALGCLV | PERFSGSNSGNTATLTISG |
| | | | | KALEWLTLIDW | QSPVLVIYQD | KDYFPEPVTVSWNSGALTSGVHTFPAVLQSSGLYSLSS | TQAMDEADYYCQAWDSSKV |
| | | | | FDDKYYSTSLK | NKRPSGIPER | VVTVPSSSLGTQTYICNVNHKPSNTKVDKKVEPKSCDK | VFGGGTKLTVLGQPKAAPS |
| | | | | TRLTISKDTSK | FSGSNSGNTA | THTCPPCPAPELLGGPSVFLFPPKPKDTLMISRTPEVT | VTLFPPSSEELQANKATLV |
| | | | | NQVVLTMTNMD | TLTISGTQAM | CVVVDVSHEDPEVKFNWYVDGVEVHNAKTKPREEQYNS | CLISDFYPGAVTVAWKADS |
| | | | | PVDTATYYCAR | DEADYYCQAW | TYRVVSVLTVLHQDWLNGKEYKCKVSNKALPAPIEKTI | SPVKAGVETTTPSKQSNNK |
| | | | | IRGTGAYYYGL | DSSKVVFGGG | SKAKGQPREPQVYTLPPSREEMTKNQVSLTCLVKGFYP | YAASSYLSLTPEQWKSHRS |
| | | | | DVWGQGTMVTV | TKLTVL | SDIAVEWESNGQPENNYKTTPPVLDSDGSFFLYSKLTV | YSCQVTHEGSTVEKTVAPT |
| | | | | SS | | DKSRWQQGNVFSCSVMHEALHNHYTQKSLSLSPGK | ECS |
| | | | | 1221 | 1222 | 1223 | 1224 |
| 37 | VG9B413 | IgG1 | Kappa | EVQLVESGGGL | EIVMTQSPGT | EVQLVESGGGLVKPGGSLRLSCSASGFTFSNYDMNWVR | EIVMTQSPGTLSLSPGDRA |
| | | | | VKPGGSLRLSC | LSLSPGDRAT | QAPGKGLEWVSSISSSSSYIYYADSVKGRFTISRDNAK | TLSCRASQSVASSYLAWYQ |
| | | | | SASGFTFSNYD | LSCRASQSVA | NSLYLQMNSLRAEDTAVYHCARDVGVTTDYYYYGMDVW | QKPGQSPRLLIYGASSRAT |
| | | | | MNWVRQAPGKG | SSYLAWYQQK | GQGTMVTVSSASTKGPSVFPLAPSSKSTSGGTAALGCL | GIPDRFSGSGSGTDFTLTI |
| | | | | LEWVSSISSSS | PGQSPRLLIY | VKDYFPEPVTVSWNSGALTSGVHTFPAVLQSSGLYSLS | SRLEPEDFAVYYCQQYGSS |
| | | | | SYIYYADSVKG | GASSRATGIP | SVVTVPSSSLGTQTYICNVNHKPSNTKVDKKVEPKSCD | PPYTFGQGTKVEIKRTVAA |
| | | | | RFTISRDNAKN | DRFSGSGSGT | KTHTCPPCPAPELLGGPSVFLFPPKPKDTLMISRTPEV | PSVFIFPPSDEQLKSGTAS |
| | | | | SLYLQMNSLRA | DFTLTISRLE | TCVVVDVSHEDPEVKFNWYVDGVEVHNAKTKPREEQYN | VVCLLNNFYPREAKVQWKV |
| | | | | EDTAVYHCARD | PEDFAVYYCQ | STYRVVSVLTVLHQDWLNGKEYKCKVSNKALPAPIEKT | DNALQSGNSQESVTEQDSK |
| | | | | VGVTTDYYYYG | QYGSSPPYTF | ISKAKGQPREPQVYTLPPSREEMTKNQVSLTCLVKGFY | DSTYSLSSTLTLSKADYEK |
| | | | | MDVWGQGTMVT | GQGTKVEIK | PSDIAVEWESNGQPENNYKTTPPVLDSDGSFFLYSKLT | HKVYACEVTHQGLSSPVTK |
| | | | | VSS | | VDKSRWQQGNVFSCSVMHEALHNHYTQKSLSLSPGK | SFNRGEC |
| | | | | 1255 | 1256 | 1257 | 1258 |
| 38 | VG9B36 | IgG1 | Kappa | QVQLVESGGGL | EIVLTQSPSS | QVQLVESGGGLVKPGGSLRLSCASSGFTFSSYGMYWVR | EIVLTQSPSSLSASVGDRV |
| | | | | VKPGGSLRLSC | LSASVGDRVT | QAPGKGLEWVSSISTGSSYIYYADSVKGRFTISRDNAK | TITCQASQDISNYLNWYQQ |
| | | | | ASSGFTFSSYG | ITCQASQDIS | NSLYLQMNSLRAEDTAVYYCARDKGLAVTGYIMDVWGQ | KPGKAPKLLIYDASNLETG |
| | | | | MYWVRQAPGKG | NYLNWYQQKP | GTTVTVSSASTKGPSVFPLAPSSKSTSGGTAALGCLVK | VPSRFSGSGSGTDFTFTIS |
| | | | | LEWVSSISTGS | GKAPKLLIYD | DYFPEPVTVSWNSGALTSGVHTFPAVLQSSGLYSLSSV | SLQPEDIAIYYCQQYDNLP |
| | | | | SYIYYADSVKG | ASNLETGVPS | VTVPSSSLGTQTYICNVNHKPSNTKVDKKVEPKSCDKT | MYTFGQGTKVEIKRTVAAP |
| | | | | RFTISRDNAKN | RFSGSGSGTD | HTCPPCPAPELLGGPSVFLFPPKPKDTLMISRTPEVTC | SVFIFPPSDEQLKSGTASV |
| | | | | SLYLQMNSLRA | FTFTISSLQP | VVVDVSHEDPEVKFNWYVDGVEVHNAKTKPREEQYNST | VCLLNNFYPREAKVQWKVD |
| | | | | EDTAVYYCARD | EDIAIYYCQQ | YRVVSVLTVLHQDWLNGKEYKCKVSNKALPAPIEKTIS | NALQSGNSQESVTEQDSKD |
| | | | | KGLAVTGYIMD | YDNLPMYTFG | KAKGQPREPQVYTLPPSREEMTKNQVSLTCLVKGFYPS | STYSLSSTLTLSKADYEKH |
| | | | | VWGQGTTVTVS | QGTKVEIK | DIAVEWESNGQPENNYKTTPPVLDSDGSFFLYSKLTVD | KVYACEVTHQGLSSPVTKS |
| | | | | S | | KSRWQQGNVFSCSVMHEALHNHYTQKSLSLSPGK | FNRGEC |
| | | | | 1289 | 1290 | 1291 | 1292 |
| 39 | VG9B403 | IgG1 | Kappa | EVQLVESGGGL | DIVMTQSPGT | EVQLVESGGGLVKPGGSLRLSCSASGFTFSNYDMNWVR | DIVMTQSPGTLSLSPGDRA |
| | | | | VKPGGSLRLSC | LSLSPGDRAT | QAPGKGLEWVSSISSSSSYIYYADSVKGRFTISRDNAK | TLSCRASQSVASSYLAWYQ |
| | | | | SASGFTFSNYD | LSCRASQSVA | NSLYLQMNSLRAEDTAVYHCARDVGVTTDYYYYGMDVW | QKPGQSPRLLIYGASSRAT |
| | | | | MNWVRQAPGKG | SSYLAWYQQK | GQGTTVTVSSASTKGPSVFPLAPSSKSTSGGTAALGCL | GIPDRFSGSGSGTDFTLTI |
| | | | | LEWVSSISSSS | PGQSPRLLIY | VKDYFPEPVTVSWNSGALTSGVHTFPAVLQSSGLYSLS | SRLEPEDFAVYYCQQYGSS |
| | | | | SYIYYADSVKG | GASSRATGIP | SVVTVPSSSLGTQTYICNVNHKPSNTKVDKKVEPKSCD | PPYTFGQGTKVEIKRTVAA |
| | | | | RFTISRDNAKN | DRFSGSGSGT | KTHTCPPCPAPELLGGPSVFLFPPKPKDTLMISRTPEV | PSVFIFPPSDEQLKSGTAS |
| | | | | SLYLQMNSLRA | DFTLTISRLE | TCVVVDVSHEDPEVKFNWYVDGVEVHNAKTKPREEQYN | VVCLLNNFYPREAKVQWKV |
| | | | | EDTAVYHCARD | PEDFAVYYCQ | STYRVVSVLTVLHQDWLNGKEYKCKVSNKALPAPIEKT | DNALQSGNSQESVTEQDSK |
| | | | | VGVTTDYYYYG | QYGSSPPYTF | ISKAKGQPREPQVYTLPPSREEMTKNQVSLTCLVKGFY | DSTYSLSSTLTLSKADYEK |
| | | | | MDVWGQGTTVT | GQGTKVEIK | PSDIAVEWESNGQPENNYKTTPPVLDSDGSFFLYSKLT | HKVYACEVTHQGLSSPVTK |
| | | | | VSS | | VDKSRWQQGNVFSCSVMHEALHNHYTQKSLSLSPGK | SFNRGEC |
| | | | | 1323 | 1324 | 1325 | 1326 |
| 40 | VG9B191 | IgG1 | Lambda | EVQLVQSGGGL | QSVLTQPPSV | EVQLVQSGGGLVKPGGSLRLSCAASGFTFSRYSMNWVR | QSVLTQPPSVSAAPGQKVT |
| | | | | VKPGGSLRLSC | SAAPGQKVTI | QAPGKGLEGVSSISSSSSYIYYADSVKGRFTISRDNAK | ISCSGSSSNIGNNYVSWYQ |
| | | | | AASGFTFSRYS | SCSGSSSNIG | NSLYLQMNSLRAEDTAVYYCARDGPTVNWDYYFDLWGR | QLPGTAPKLLIYDNNKRPS |
| | | | | MNWVRQAPGKG | NNYVSWYQQL | GTLVTVSSASTKGPSVFPLAPSSKSTSGGTAALGCLVK | GIPDRFSGSKSGTSATLGI |
| | | | | LEGVSSISSSS | PGTAPKLLIY | DYFPEPVTVSWNSGALTSGVHTFPAVLQSSGLYSLSSV | TGLQTGDEADYYCGTWDSS |
| | | | | SYIYYADSVKG | DNNKRPSGIP | VTVPSSSLGTQTYICNVNHKPSNTKVDKKVEPKSCDKT | LSTSVVFGGGTKLTVLGQP |
| | | | | RFTISRDNAKN | DRFSGSKSGT | HTCPPCPAPELLGGPSVFLFPPKPKDTLMISRTPEVTC | KAAPSVTLFPPSSEELQAN |
| | | | | SLYLQMNSLRA | SATLGITGLQ | VVVDVSHEDPEVKFNWYVDGVEVHNAKTKPREEQYNST | KATLVCLISDFYPGAVTVA |
| | | | | EDTAVYYCARD | TGDEADYYCG | YRVVSVLTVLHQDWLNGKEYKCKVSNKALPAPIEKTIS | WKADSSPVKAGVETTTPSK |
| | | | | GPTVNWDYYFD | TWDSSLSTSV | KAKGQPREPQVYTLPPSREEMTKNQVSLTCLVKGFYPS | QSNNKYAASSYLSLTPEQW |
| | | | | LWGRGTLVTVS | VFGGGTKLTV | DIAVEWESNGQPENNYKTTPPVLDSDGSFFLYSKLTVD | KSHRSYSCQVTHEGSTVEK |
| | | | | S | L | KSRWQQGNVFSCSVMHEALHNHYTQKSLSLSPGK | TVAPTECS |
| | | | | 1357 | 1358 | 1359 | 1360 |
| 41 | VG9B44 | IgG1 | Kappa | QVQLQQSGPGL | DIQMTQSPSF | QVQLQQSGPGLVKPSQTLSLTCAISGDSVSSNSAAWNW | DIQMTQSPSFLSASVGDRV |
| | | | | VKPSQTLSLTC | LSASVGDRVT | IRQSPSRGLEWLGRTYYRSKWYNDYPISVKSRISINPD | TITCRASQGISSYLAWYQQ |
| | | | | AISGDSVSSNS | ITCRASQGIS | TSKNQFSLQLNSVTPEDTAVYYCARESGSYYTDGFDIW | KPGKAPKLLIYAASTLQSG |
| | | | | AAWNWIRQSPS | SYLAWYQQKP | GQGTMVTVSSASTKGPSVFPLAPSSKSTSGGTAALGCL | VPSRFSGSGSGTEFTLTIS |
| | | | | RGLEWLGRTYY | GKAPKLLIYA | VKDYFPEPVTVSWNSGALTSGVHTFPAVLQSSGLYSLS | SLQPEDFATYYCQEFNSYP |
| | | | | RSKWYNDYPIS | ASTLQSGVPS | SVVTVPSSSLGTQTYICNVNHKPSNTKVDKKVEPKSCD | YTFGQGTKLEIKRTVAAPS |
| | | | | VKSRISINPDT | RFSGSGSGTE | KTHTCPPCPAPELLGGPSVFLFPPKPKDTLMISRTPEV | VFIFPPSDEQLKSGTASVV |
| | | | | SKNQFSLQLNS | FTLTISSLQP | TCVVVDVSHEDPEVKFNWYVDGVEVHNAKTKPREEQYN | CLLNNFYPREAKVQWKVDN |
| | | | | VTPEDTAVYYC | EDFATYYCQE | STYRVVSVLTVLHQDWLNGKEYKCKVSNKALPAPIEKT | ALQSGNSQESVTEQDSKDS |
| | | | | ARESGSYYTDG | FNSYPYTFGQ | ISKAKGQPREPQVYTLPPSREEMTKNQVSLTCLVKGFY | TYSLSSTLTLSKADYEKHK |
| | | | | FDIWGQGTMVT | GTKLEIK | PSDIAVEWESNGQPENNYKTTPPVLDSDGSFFLYSKLT | VYACEVTHQGLSSPVTKSF |
| | | | | VSS | | VDKSRWQQGNVFSCSVMHEALHNHYTQKSLSLSPGK | NRGEC |
| | | | | 1391 | 1392 | 1393 | 1394 |
| 42 | VG9B67 | IgG1 | Kappa | EVQLVESGGGL | DIVMTQTPLS | EVQLVESGGGLVKPGGSLRLSCAASGFTFSSYTMNWVR | DIVMTQTPLSLPVTPGEPA |
| | | | | VKPGGSLRLSC | LPVTPGEPAS | QAPGKGLEWVSSISSSSSYIDYAESVKGRFTISRDNAK | SISCRSSQSLLDSDAGNTY |
| | | | | AASGFTFSSYT | ISCRSSQSLL | NSLYLQMNSLRAEDTAVYYCARDGDILATIRGSFDYWG | LDWYLQKPGQSPQLLIYTL |
| | | | | MNWVRQAPGKG | DSDAGNTYLD | QGTTVTVSSASTKGPSVFPLAPSSKSTSGGTAALGCLV | SYRASGVPDRFSGSGSGTD |
| | | | | LEWVSSISSSS | WYLQKPGQSP | KDYFPEPVTVSWNSGALTSGVHTFPAVLQSSGLYSLSS | FTLKISRVEAEDVAIYYCM |
| | | | | SYIDYAESVKG | QLLIYTLSYR | VVTVPSSSLGTQTYICNVNHKPSNTKVDKKVEPKSCDK | QRIEFPITFGQGTKVEIKR |
| | | | | RFTISRDNAKN | ASGVPDRFSG | THTCPPCPAPELLGGPSVFLFPPKPKDTLMISRTPEVT | TVAAPSVFIFPPSDEQLKS |
| | | | | SLYLQMNSLRA | SGSGTDFTLK | CVVVDVSHEDPEVKFNWYVDGVEVHNAKTKPREEQYNS | GTASVVCLLNNFYPREAKV |
| | | | | EDTAVYYCARD | ISRVEAEDVA | TYRVVSVLTVLHQDWLNGKEYKCKVSNKALPAPIEKTI | QWKVDNALQSGNSQESVTE |
| | | | | GDILATIRGSF | IYYCMQRIEF | SKAKGQPREPQVYTLPPSREEMTKNQVSLTCLVKGFYP | QDSKDSTYSLSSTLTLSKA |
| | | | | DYWGQGTTVTV | PITFGQGTKV | SDIAVEWESNGQPENNYKTTPPVLDSDGSFFLYSKLTV | DYEKHKVYACEVTHQGLSS |
| | | | | SS | EIK | DKSRWQQGNVFSCSVMHEALHNHYTQKSLSLSPGK | PVTKSFNRGEC |
| | | | | 1425 | 1426 | 1427 | 1428 |
| 43 | VG9B402 | IgG1 | Kappa | EVQLVQSGGGL | DIQMTQSPSS | EVQLVQSGGGLVKPGGSLRLSCAASGFTFSNYGMNWVR | DIQMTQSPSSVSASVGDRV |
| | | | | VKPGGSLRLSC | VSASVGDRVT | QAPGKGLEWVSYISSGSSYKYYADSMKGRFTISRDNAM | TITCRASQGINSWLAWYQQ |
| | | | | AASGFTFSNYG | ITCRASQGIN | NLLYLQMNSLRPEDSAMYYCARDPVVTEYYYYGMDVWG | KPGNAPKLLIYAASSLQSG |
| | | | | MNWVRQAPGKG | SWLAWYQQKP | QGTMVTVSSASTKGPSVFPLAPSSKSTSGGTAALGCLV | VPSRFSGIGSGTDFIFTIS |
| | | | | LEWVSYISSGS | GNAPKLLIYA | KDYFPEPVTVSWNSGALTSGVHTFPAVLQSSGLYSLSS | SLQPEDFASYYCQQANSFP |
| | | | | SYKYYADSMKG | ASSLQSGVPS | VVTVPSSSLGTQTYICNVNHKPSNTKVDKKVEPKSCDK | WTFGQGTKVDIKRTVAAPS |
| | | | | RFTISRDNAMN | RFSGIGSGTD | THTCPPCPAPELLGGPSVFLFPPKPKDTLMISRTPEVT | VFIFPPSDEQLKSGTASVV |
| | | | | LLYLQMNSLRP | FIFTISSLQP | CVVVDVSHEDPEVKFNWYVDGVEVHNAKTKPREEQYNS | CLLNNFYPREAKVQWKVDN |
| | | | | EDSAMYYCARD | EDFASYYCQQ | TYRVVSVLTVLHQDWLNGKEYKCKVSNKALPAPIEKTI | ALQSGNSQESVTEQDSKDS |
| | | | | PVVTEYYYYGM | ANSFPWTFGQ | SKAKGQPREPQVYTLPPSREEMTKNQVSLTCLVKGFYP | TYSLSSTLTLSKADYEKHK |
| | | | | DVWGQGTMVTV | GTKVDIK | SDIAVEWESNGQPENNYKTTPPVLDSDGSFFLYSKLTV | VYACEVTHQGLSSPVTKSF |
| | | | | SS | | DKSRWQQGNVFSCSVMHEALHNHYTQKSLSLSPGK | NRGEC |
| | | | | 1459 | 1460 | 1461 | 1462 |
| 44 | VG9B127 | IgG1 | Kappa | QVQLVESGGGL | EIVMTQSPLS | QVQLVESGGGLVKPGGSLRLSCTASGFTFGAYTMNWVR | EIVMTQSPLSLPVTPGEPA |
| | | | | VKPGGSLRLSC | LPVTPGEPAS | QAPGKGLEWVSSISSSSSYIDFAESVKGRFTISRDNAK | SISCRSSQSLLDSDDGNTY |
| | | | | TASGFTFGAYT | ISCRSSQSLL | NSLYLQMISLRAEDTAVYYCARDGDIVSTIRGSFDYWG | LDWYLQKPGQSPQLLIYTL |
| | | | | MNWVRQAPGKG | DSDDGNTYLD | QGALVTVSSASTKGPSVFPLAPSSKSTSGGTAALGCLV | SYRASGVPDRFSGSGSGTD |
| | | | | LEWVSSISSSS | WYLQKPGQSP | KDYFPEPVTVSWNSGALTSGVHTFPAVLQSSGLYSLSS | FTLKISRVEAEDVGIYYCM |
| | | | | SYIDFAESVKG | QLLIYTLSYR | VVTVPSSSLGTQTYICNVNHKPSNTKVDKKVEPKSCDK | QRIEFPITFGQGTKVEIKR |
| | | | | RFTISRDNAKN | ASGVPDRFSG | THTCPPCPAPELLGGPSVFLFPPKPKDTLMISRTPEVT | TVAAPSVFIFPPSDEQLKS |
| | | | | SLYLQMISLRA | SGSGTDFTLK | CVVVDVSHEDPEVKFNWYVDGVEVHNAKTKPREEQYNS | GTASVVCLLNNFYPREAKV |
| | | | | EDTAVYYCARD | ISRVEAEDVG | TYRVVSVLTVLHQDWLNGKEYKCKVSNKALPAPIEKTI | QWKVDNALQSGNSQESVTE |
| | | | | GDIVSTIRGSF | IYYCMQRIEF | SKAKGQPREPQVYTLPPSREEMTKNQVSLTCLVKGFYP | QDSKDSTYSLSSTLTLSKA |
| | | | | DYWGQGALVTV | PITFGQGTKV | SDIAVEWESNGQPENNYKTTPPVLDSDGSFFLYSKLTV | DYEKHKVYACEVTHQGLSS |
| | | | | SS | EIK | DKSRWQQGNVFSCSVMHEALHNHYTQKSLSLSPGK | PVTKSFNRGEC |
| | | | | 1493 | 1494 | 1495 | 1496 |
| 45 | VG9B137 | IgG1 | Kappa | EVQLVESGGGL | EIVMTQSPGT | EVQLVESGGGLVKPGGSLRLSCAAFGITFSSYSMDWVR | EIVMTQSPGTLSLSPGERA |
| | | | | VKPGGSLRLSC | LSLSPGERAT | QAPGRGLEWVSSIGSSSSYIFYADSVKGRFTISRDNAK | TLSCRASQSVSSSYLAWYQ |
| | | | | AAFGITFSSYS | LSCRASQSVS | NSLYLQMNSLRAEDTAVYYCATSYSWNYGGAFDIWGQG | QKPGQAPRLLIYGASSRAT |
| | | | | MDWVRQAPGRG | SSYLAWYQQK | TMVTVSSASTKGPSVFPLAPSSKSTSGGTAALGCLVKD | GIPDRFSGSGSGTDFTLTI |
| | | | | LEWVSSIGSSS | PGQAPRLLIY | YFPEPVTVSWNSGALTSGVHTFPAVLQSSGLYSLSSVV | SRLEPEDFAVYFCQQYGSS |
| | | | | SYIFYADSVKG | GASSRATGIP | TVPSSSLGTQTYICNVNHKPSNTKVDKKVEPKSCDKTH | PPYTFGQGTKVEIKRTVAA |
| | | | | RFTISRDNAKN | DRFSGSGSGT | TCPPCPAPELLGGPSVFLFPPKPKDTLMISRTPEVTCV | PSVFIFPPSDEQLKSGTAS |
| | | | | SLYLQMNSLRA | DFTLTISRLE | VVDVSHEDPEVKFNWYVDGVEVHNAKTKPREEQYNSTY | VVCLLNNFYPREAKVQWKV |
| | | | | EDTAVYYCATS | PEDFAVYFCQ | RVVSVLTVLHQDWLNGKEYKCKVSNKALPAPIEKTISK | DNALQSGNSQESVTEQDSK |
| | | | | YSWNYGGAFDI | QYGSSPPYTF | AKGQPREPQVYTLPPSREEMTKNQVSLTCLVKGFYPSD | DSTYSLSSTLTLSKADYEK |
| | | | | WGQGTMVTVSS | GQGTKVEIK | IAVEWESNGQPENNYKTTPPVLDSDGSFFLYSKLTVDK | HKVYACEVTHQGLSSPVTK |
| | | | | | | SRWQQGNVFSCSVMHEALHNHYTQKSLSLSPGK | SFNRGEC |
| | | | | 1527 | 1528 | 1529 | 1530 |
| 46 | VG9B33 | IgG1 | Kappa | EVQLVESGGGL | DIVMTQSPSS | EVQLVESGGGLVKPGGSLRLSCAASGFTFSSYNMNWVR | DIVMTQSPSSLSASVGDRV |
| | | | | VKPGGSLRLSC | LSASVGDRVT | QAPGKGLEWVSSISTSSSYIYYADSVKGRFTISRDNAK | TITCRASQDINNYLAWFQQ |
| | | | | AASGFTFSSYN | ITCRASQDIN | NSLYLQMNGLRAEDTAVYYCARDTSVTKYPDTFDIWGQ | KPGKVPNLLIYGASTLQSG |
| | | | | MNWVRQAPGKG | NYLAWFQQKP | GTMVTVSSASTKGPSVFPLAPSSKSTSGGTAALGCLVK | VPSRFTGSGSGTDFTLTIS |
| | | | | LEWVSSISTSS | GKVPNLLIYG | DYFPEPVTVSWNSGALTSGVHTFPAVLQSSGLYSLSSV | SLQPEDVATYYCQKYNSAP |
| | | | | SYIYYADSVKG | ASTLQSGVPS | VTVPSSSLGTQTYICNVNHKPSNTKVDKKVEPKSCDKT | FTFGPGTKVDIKRTVAAPS |
| | | | | RFTISRDNAKN | RFTGSGSGTD | HTCPPCPAPELLGGPSVFLFPPKPKDTLMISRTPEVTC | VFIFPPSDEQLKSGTASVV |
| | | | | SLYLQMNGLRA | FTLTISSLQP | VVVDVSHEDPEVKFNWYVDGVEVHNAKTKPREEQYNST | CLLNNFYPREAKVQWKVDN |
| | | | | EDTAVYYCARD | EDVATYYCQK | YRVVSVLTVLHQDWLNGKEYKCKVSNKALPAPIEKTIS | ALQSGNSQESVTEQDSKDS |
| | | | | TSVTKYPDTFD | YNSAPFTFGP | KAKGQPREPQVYTLPPSREEMTKNQVSLTCLVKGFYPS | TYSLSSTLTLSKADYEKHK |
| | | | | IWGQGTMVTVS | GTKVDIK | DIAVEWESNGQPENNYKTTPPVLDSDGSFFLYSKLTVD | VYACEVTHQGLSSPVTKSF |
| | | | | S | | KSRWQQGNVFSCSVMHEALHNHYTQKSLSLSPGK | NRGEC |
| | | | | 1561 | 1562 | 1563 | 1564 |
| 47 | VG9B162 | IgG1 | Lambda | QVQLVESGAEV | QLVLTQSSSA | QVQLVESGAEVTKPGASVKVSCKASGYTFTGDYMHWVR | QLVLTQSSSASGSPGQSVT |
| | | | | TKPGASVKVSC | SGSPGQSVTI | QAPGQGLEWMGWINPNSGYTNYAQKFQGRVTMTRDTSI | ISCTGTSSDVGGYNYVSWY |
| | | | | KASGYTFTGDY | SCTGTSSDVG | STAYMELSRLRSDDTAVYYCAREGDAFDVWGQGTMVTV | QQHPGKAPKLMIYEVSKRP |
| | | | | MHWVRQAPGQG | GYNYVSWYQQ | SSASTKGPSVFPLAPSSKSTSGGTAALGCLVKDYFPEP | SGVPDRFSGSKSGNTASLT |
| | | | | LEWMGWINPNS | HPGKAPKLMI | VTVSWNSGALTSGVHTFPAVLQSSGLYSLSSVVTVPSS | VSGLQAEDEADYYCNSYAG |
| | | | | GYTNYAQKFQG | YEVSKRPSGV | SLGTQTYICNVNHKPSNTKVDKKVEPKSCDKTHTCPPC | SNNFEVFGGGTKLTVLGQP |
| | | | | RVTMTRDTSIS | PDRFSGSKSG | PAPELLGGPSVFLFPPKPKDTLMISRTPEVTCVVVDVS | KAAPSVTLFPPSSEELQAN |
| | | | | TAYMELSRLRS | NTASLTVSGL | HEDPEVKFNWYVDGVEVHNAKTKPREEQYNSTYRVVSV | KATLVCLISDFYPGAVTVA |
| | | | | DDTAVYYCARE | QAEDEADYYC | LTVLHQDWLNGKEYKCKVSNKALPAPIEKTISKAKGQP | WKADSSPVKAGVETTTPSK |
| | | | | GDAFDVWGQGT | NSYAGSNNFE | REPQVYTLPPSREEMTKNQVSLTCLVKGFYPSDIAVEW | QSNNKYAASSYLSLTPEQW |
| | | | | MVTVSS | VFGGGTKLTV | ESNGQPENNYKTTPPVLDSDGSFFLYSKLTVDKSRWQQ | KSHRSYSCQVTHEGSTVEK |
| | | | | | L | GNVFSCSVMHEALHNHYTQKSLSLSPGK | TVAPTECS |
| | | | | 1595 | 1596 | 1597 | 1598 |
| 48 | VG9B152 | IgG1 | Lambda | EVQLVESGGGL | SYELMQPPSV | EVQLVESGGGLVRPGGSLRLSCEASGFTFSSYSMIWVR | SYELMQPPSVSVSPGQTAS |
| | | | | VRPGGSLRLSC | SVSPGQTASI | QAPGKGLEWVSSISSSSDYIYNADSVKGRFTISRDNAK | ITCSGDKLGDKYACWYQQK |
| | | | | EASGFTFSSYS | TCSGDKLGDK | NSLYLQMNSLRAEDTAVYYCARDWELLGFDCWGQGTTV | PGQSPVLVIYQHNKRPSGI |
| | | | | MIWVRQAPGKG | YACWYQQKPG | TVSSASTKGPSVFPLAPSSKSTSGGTAALGCLVKDYFP | PERFSGSNSGKTATLTISG |
| | | | | LEWVSSISSSS | QSPVLVIYQH | EPVTVSWNSGALTSGVHTFPAVLQSSGLYSLSSVVTVP | TQAMDEADYYCQAWDSTTV |
| | | | | DYIYNADSVKG | NKRPSGIPER | SSSLGTQTYICNVNHKPSNTKVDKKVEPKSCDKTHTCP | VFGGGTKLTVLGQPKAAPS |
| | | | | RFTISRDNAKN | FSGSNSGKTA | PCPAPELLGGPSVFLFPPKPKDTLMISRTPEVTCVVVD | VTLFPPSSEELQANKATLV |
| | | | | SLYLQMNSLRA | TLTISGTQAM | VSHEDPEVKFNWYVDGVEVHNAKTKPREEQYNSTYRVV | CLISDFYPGAVTVAWKADS |
| | | | | EDTAVYYCARD | DEADYYCQAW | SVLTVLHQDWLNGKEYKCKVSNKALPAPIEKTISKAKG | SPVKAGVETTTPSKQSNNK |
| | | | | WELLGFDCWGQ | DSTTVVFGGG | QPREPQVYTLPPSREEMTKNQVSLTCLVKGFYPSDIAV | YAASSYLSLTPEQWKSHRS |
| | | | | GTTVTVSS | TKLTVL | EWESNGQPENNYKTTPPVLDSDGSFFLYSKLTVDKSRW | YSCQVTHEGSTVEKTVAPT |
| | | | | | | QQGNVFSCSVMHEALHNHYTQKSLSLSPGK | ECS |
| | | | | 1629 | 1630 | 1631 | 1632 |
| 49 | VG9B64 | IgG1 | Kappa | QVQLVESGPTL | DIVMTQTPLS | QVQLVESGPTLVKPTQTLTLTCTFSGFSLSISGVSVGW | DIVMTQTPLSSPVTLGQPA |
| | | | | VKPTQTLTLTC | SPVTLGQPAS | IRQPPGKALEWLALIYWNDDKRYSPSLQSRVTITKDTS | SISCRSSESLVHSDGNTYL |
| | | | | TFSGFSLSISG | ISCRSSESLV | KNQVVLTVTNMDSVDTATYYCVHSGQWLEGDAFDIWGQ | SWLQQSPGQPPRLLIYKIS |
| | | | | VSVGWIRQPPG | HSDGNTYLSW | GTMVTVSSASTKGPSVFPLAPSSKSTSGGTAALGCLVK | NRFSGVPDRFSGSGAGTDF |
| | | | | KALEWLALIYW | LQQSPGQPPR | DYFPEPVTVSWNSGALTSGVHTFPAVLQSSGLYSLSSV | TLKISRVEAEDVGVYYCMQ |
| | | | | NDDKRYSPSLQ | LLIYKISNRF | VTVPSSSLGTQTYICNVNHKPSNTKVDKKVEPKSCDKT | ATQFPLTFGGGTKLEIKRT |
| | | | | SRVTITKDTSK | SGVPDRFSGS | HTCPPCPAPELLGGPSVFLFPPKPKDTLMISRTPEVTC | VAAPSVFIFPPSDEQLKSG |
| | | | | NQVVLTVTNMD | GAGTDFTLKI | VVVDVSHEDPEVKFNWYVDGVEVHNAKTKPREEQYNST | TASVVCLLNNFYPREAKVQ |
| | | | | SVDTATYYCVH | SRVEAEDVGV | YRVVSVLTVLHQDWLNGKEYKCKVSNKALPAPIEKTIS | WKVDNALQSGNSQESVTEQ |
| | | | | SGQWLEGDAFD | YYCMQATQFP | KAKGQPREPQVYTLPPSREEMTKNQVSLTCLVKGFYPS | DSKDSTYSLSSTLTLSKAD |
| | | | | IWGQGTMVTVS | LTFGGGTKLE | DIAVEWESNGQPENNYKTTPPVLDSDGSFFLYSKLTVD | YEKHKVYACEVTHQGLSSP |
| | | | | S | IK | KSRWQQGNVFSCSVMHEALHNHYTQKSLSLSPGK | VTKSFNRGEC |
| | | | | 1663 | 1664 | 1665 | 1666 |
| 50 | VG9B21 | IgG1 | Kappa | EVQLLESGGGL | DIVMTQSPSS | EVQLLESGGGLVKPGGSLRLSCAASGFSFSNYDMNWVR | DIVMTQSPSSLSASVGDRV |
| | | | | VKPGGSLRLSC | LSASVGDRVT | QAPRKGLEWVSSISSSSHYIYYADSLKGRFTISRDNAK | TITCRASQGIYNYLAWYQQ |
| | | | | AASGFSFSNYD | ITCRASQGIY | NSLFLQMNSLRAEDTAVYYCARDRGVTTDYYYYALDVW | KPGNVPKLLIYAASTLQSG |
| | | | | MNWVRQAPRKG | NYLAWYQQKP | GQGTMVTVSSASTKGPSVFPLAPSSKSTSGGTAALGCL | VPSRFSGSGSGTDFSLTIS |
| | | | | LEWVSSISSSS | GNVPKLLIYA | VKDYFPEPVTVSWNSGALTSGVHTFPAVLQSSGLYSLS | SLQPEDFTTYYCQKYNRAP |
| | | | | HYIYYADSLKG | ASTLQSGVPS | SVVTVPSSSLGTQTYICNVNHKPSNTKVDKKVEPKSCD | FTFGPGTKVDIKRTVAAPS |
| | | | | RFTISRDNAKN | RFSGSGSGTD | KTHTCPPCPAPELLGGPSVFLFPPKPKDTLMISRTPEV | VFIFPPSDEQLKSGTASVV |
| | | | | SLFLQMNSLRA | FSLTISSLQP | TCVVVDVSHEDPEVKFNWYVDGVEVHNAKTKPREEQYN | CLLNNFYPREAKVQWKVDN |
| | | | | EDTAVYYCARD | EDFTTYYCQK | STYRVVSVLTVLHQDWLNGKEYKCKVSNKALPAPIEKT | ALQSGNSQESVTEQDSKDS |
| | | | | RGVTTDYYYYA | YNRAPFTFGP | ISKAKGQPREPQVYTLPPSREEMTKNQVSLTCLVKGFY | TYSLSSTLTLSKADYEKHK |
| | | | | LDVWGQGTMVT | GTKVDIK | PSDIAVEWESNGQPENNYKTTPPVLDSDGSFFLYSKLT | VYACEVTHQGLSSPVTKSF |
| | | | | VSS | | VDKSRWQQGNVFSCSVMHEALHNHYTQKSLSLSPGK | NRGEC |
| | | | | 1697 | 1698 | 1699 | 1700 |
| 51 | VG9B128 | IgG1 | Kappa | EVQLVESGGGV | DIVMTQTPAT | EVQLVESGGGVVQPGKSLRLSCTASGFTFGTYGMHWVR | DIVMTQTPATLSLSPGERA |
| | | | | VQPGKSLRLSC | LSLSPGERAT | QAPGKGLDWVAVIWYNGSNKYYADSVKGRFTISRDNSK | TLSCRASQSVIDYLAWFQQ |
| | | | | TASGFTFGTYG | LSCRASQSVI | NTLYLQMNSLRTEDTAVYYCARGGFGESFDSWGQGTLV | KPGQAPRLLIYDASNRATG |
| | | | | MHWVRQAPGKG | DYLAWFQQKP | TVSSASTKGPSVFPLAPSSKSTSGGTAALGCLVKDYFP | IPARFSGSGSGTDFTLTIS |
| | | | | LDWVAVIWYNG | GQAPRLLIYD | EPVTVSWNSGALTSGVHTFPAVLQSSGLYSLSSVVTVP | SLEPEDFAVYYCQQRSNWP |
| | | | | SNKYYADSVKG | ASNRATGIPA | SSSLGTQTYICNVNHKPSNTKVDKKVEPKSCDKTHTCP | LTFGGGTKVEIKRTVAAPS |
| | | | | RFTISRDNSKN | RFSGSGSGTD | PCPAPELLGGPSVFLFPPKPKDTLMISRTPEVTCVVVD | VFIFPPSDEQLKSGTASVV |
| | | | | TLYLQMNSLRT | FTLTISSLEP | VSHEDPEVKFNWYVDGVEVHNAKTKPREEQYNSTYRVV | CLLNNFYPREAKVQWKVDN |
| | | | | EDTAVYYCARG | EDFAVYYCQQ | SVLTVLHQDWLNGKEYKCKVSNKALPAPIEKTISKAKG | ALQSGNSQESVTEQDSKDS |
| | | | | GFGESFDSWGQ | RSNWPLTFGG | QPREPQVYTLPPSREEMTKNQVSLTCLVKGFYPSDIAV | TYSLSSTLTLSKADYEKHK |
| | | | | GTLVTVSS | GTKVEIK | EWESNGQPENNYKTTPPVLDSDGSFFLYSKLTVDKSRW | VYACEVTHQGLSSPVTKSF |
| | | | | | | QQGNVFSCSVMHEALHNHYTQKSLSLSPGK | NRGEC |
| | | | | 1731 | 1732 | 1733 | 1734 |
| 52 | VG9B66 | IgG1 | Kappa | EVQLVESGGGL | EIVLTQSPSS | EVQLVESGGGLVKPGGSLRLSCAASGFTFSTYTMNWVR | EIVLTQSPSSLSTSVGDRV |
| | | | | VKPGGSLRLSC | LSTSVGDRVT | QAPGKGLEWVSSISSSSFYMDYADSVKGRFTISRDNAK | TITCRASQDITNFLAWYQQ |
| | | | | AASGFTFSTYT | ITCRASQDIT | NSLSLLMNSLRAEDTAVYYCARDGDIVATIRGSFDYWG | KPGKLPKLLIYTASTLQSG |
| | | | | MNWVRQAPGKG | NFLAWYQQKP | QGTMVTVSSASTKGPSVFPLAPSSKSTSGGTAALGCLV | VPSRFSGSASGPDFTLTIS |
| | | | | LEWVSSISSSS | GKLPKLLIYT | KDYFPEPVTVSWNSGALTSGVHTFPAVLQSSGLYSLSS | SLQPEDVATYYCQKYNSAP |
| | | | | FYMDYADSVKG | ASTLQSGVPS | VVTVPSSSLGTQTYICNVNHKPSNTKVDKKVEPKSCDK | FTFGPGTKVEIKRTVAAPS |
| | | | | RFTISRDNAKN | RFSGSASGPD | THTCPPCPAPELLGGPSVFLFPPKPKDTLMISRTPEVT | VFIFPPSDEQLKSGTASVV |
| | | | | SLSLLMNSLRA | FTLTISSLQP | CVVVDVSHEDPEVKFNWYVDGVEVHNAKTKPREEQYNS | CLLNNFYPREAKVQWKVDN |
| | | | | EDTAVYYCARD | EDVATYYCQK | TYRVVSVLTVLHQDWLNGKEYKCKVSNKALPAPIEKTI | ALQSGNSQESVTEQDSKDS |
| | | | | GDIVATIRGSF | YNSAPFTFGP | SKAKGQPREPQVYTLPPSREEMTKNQVSLTCLVKGFYP | TYSLSSTLTLSKADYEKHK |
| | | | | DYWGQGTMVTV | GTKVEIK | SDIAVEWESNGQPENNYKTTPPVLDSDGSFFLYSKLTV | VYACEVTHQGLSSPVTKSF |
| | | | | SS | | DKSRWQQGNVFSCSVMHEALHNHYTQKSLSLSPGK | NRGEC |
| | | | | 1765 | 1766 | 1767 | 1768 |
| 53 | VG9B32 | IgG1 | Kappa | EVQLVQSGGDL | DIVMTQTPLS | EVQLVQSGGDLLQPGGSLRLSCAASGFTFSRYAMNWVR | DIVMTQTPLSSPVTLGQPA |
| | | | | LQPGGSLRLSC | SPVTLGQPAS | QAPGKGLEWVSFISGTGYTVYYADSVKGRFTISRDNAK | SISCRSGQSLVHSDGNTYL |
| | | | | AASGFTFSRYA | ISCRSGQSLV | NSLYLQMNSLRDEDTAVYYCARDQEPGFDYWGQGTLVT | SWLQQRPGQPPRLLIYKIS |
| | | | | MNWVRQAPGKG | HSDGNTYLSW | VSSASTKGPSVFPLAPSSKSTSGGTAALGCLVKDYFPE | NRFSGVPDRFSGSGAGTDF |
| | | | | LEWVSFISGTG | LQQRPGQPPR | PVTVSWNSGALTSGVHTFPAVLQSSGLYSLSSVVTVPS | TLKISRVEAEDVGVYYCMQ |
| | | | | YTVYYADSVKG | LLIYKISNRF | SSLGTQTYICNVNHKPSNTKVDKKVEPKSCDKTHTCPP | ATHFPFTFGQGTKLEIKRT |
| | | | | RFTISRDNAKN | SGVPDRFSGS | CPAPELLGGPSVFLFPPKPKDTLMISRTPEVTCVVVDV | VAAPSVFIFPPSDEQLKSG |
| | | | | SLYLQMNSLRD | GAGTDFTLKI | SHEDPEVKFNWYVDGVEVHNAKTKPREEQYNSTYRVVS | TASVVCLLNNFYPREAKVQ |
| | | | | EDTAVYYCARD | SRVEAEDVGV | VLTVLHQDWLNGKEYKCKVSNKALPAPIEKTISKAKGQ | WKVDNALQSGNSQESVTEQ |
| | | | | QEPGFDYWGQG | YYCMQATHFP | PREPQVYTLPPSREEMTKNQVSLTCLVKGFYPSDIAVE | DSKDSTYSLSSTLTLSKAD |
| | | | | TLVTVSS | FTFGQGTKLE | WESNGQPENNYKTTPPVLDSDGSFFLYSKLTVDKSRWQ | YEKHKVYACEVTHQGLSSP |
| | | | | | IK | QGNVFSCSVMHEALHNHYTQKSLSLSPGK | VTKSFNRGEC |
| | | | | 1799 | 1800 | 1801 | 1802 |
| 54 | VG9B57 | IgG1 | Kappa | EVQLVESGGGL | DIQMTQSPSA | EVQLVESGGGLVKPGGSLRLSCAASGFTFSSHDMNWVR | DIQMTQSPSAMSASVGDRV |
| | | | | VKPGGSLRLSC | MSASVGDRVT | QAPGKGLGWVSSISSSSSYIFYADSVKGRFTISRDNAK | TITCRASQDITNYLAWFQQ |
| | | | | AASGFTFSSHD | ITCRASQDIT | NSLYLQMSSLRAEDTAVYYCARDLGVGVRDYYYYGMDV | KPGKVPKRLIYAASSLQGG |
| | | | | MNWVRQAPGKG | NYLAWFQQKP | WGQGTMVTVSSASTKGPSVFPLAPSSKSTSGGTAALGC | VPSRFSGSGSGTEFTLTIS |
| | | | | LGWVSSISSSS | GKVPKRLIYA | LVKDYFPEPVTVSWNSGALTSGVHTFPAVLQSSGLYSL | SLQPEDFSTYYCLQHDTYP |
| | | | | SYIFYADSVKG | ASSLQGGVPS | SSVVTVPSSSLGTQTYICNVNHKPSNTKVDKKVEPKSC | YTFGQGTKLEIKRTVAAPS |
| | | | | RFTISRDNAKN | RFSGSGSGTE | DKTHTCPPCPAPELLGGPSVFLFPPKPKDTLMISRTPE | VFIFPPSDEQLKSGTASVV |
| | | | | SLYLQMSSLRA | FTLTISSLQP | VTCVVVDVSHEDPEVKFNWYVDGVEVHNAKTKPREEQY | CLLNNFYPREAKVQWKVDN |
| | | | | EDTAVYYCARD | EDFSTYYCLQ | NSTYRVVSVLTVLHQDWLNGKEYKCKVSNKALPAPIEK | ALQSGNSQESVTEQDSKDS |
| | | | | LGVGVRDYYYY | HDTYPYTFGQ | TISKAKGQPREPQVYTLPPSREEMTKNQVSLTCLVKGF | TYSLSSTLTLSKADYEKHK |
| | | | | GMDVWGQGTMV | GTKLEIK | YPSDIAVEWESNGQPENNYKTTPPVLDSDGSFFLYSKL | VYACEVTHQGLSSPVTKSF |
| | | | | TVSS | | TVDKSRWQQGNVFSCSVMHEALHNHYTQKSLSLSPGK | NRGEC |
| | | | | 1833 | 1834 | 1835 | 1836 |
| 55 | VG9B135 | IgG1 | Kappa | QVTLKESGPTL | DIVMTQSPGT | QVTLKESGPTLVTPSQTLTLTCTFSGFSLTTYGVGVGW | DIVMTQSPGTLSLSPGERA |
| | | | | VTPSQTLTLTC | LSLSPGERAT | IRQPPGKALEWLALIYWNDDKRYYPSLNNRLTITKDTS | TLSCRASQSVSSSYLAWYQ |
| | | | | TFSGFSLTTYG | LSCRASQSVS | KHLVVLTLTNMDPVDTATYYCAHDYDFWSGYFDYWGQG | QKPGQAPRLLIYGASSRAT |
| | | | | VGVGWIRQPPG | SSYLAWYQQK | TLVTVSSASTKGPSVFPLAPSSKSTSGGTAALGCLVKD | GIPDRFSGSGSGTDFTLTI |
| | | | | KALEWLALIYW | PGQAPRLLIY | YFPEPVTVSWNSGALTSGVHTFPAVLQSSGLYSLSSW | SRLEPEDFAVYYCQQYGSS |
| | | | | NDDKRYYPSLN | GASSRATGIP | TVPSSSLGTQTYICNVNHKPSNTKVDKKVEPKSCDKTH | PLTFGGGTKVEIKRTVAAP |
| | | | | NRLTITKDTSK | DRFSGSGSGT | TCPPCPAPELLGGPSVFLFPPKPKDTLMISRTPEVTCV | SVFIFPPSDEQLKSGTASV |
| | | | | HLVVLTLTNMD | DFTLTISRLE | VVDVSHEDPEVKFNWYVDGVEVHNAKTKPREEQYNSTY | VCLLNNFYPREAKVQWKVD |
| | | | | PVDTATYYCAH | PEDFAVYYCQ | RVVSVLTVLHQDWLNGKEYKCKVSNKALPAPIEKTISK | NALQSGNSQESVTEQDSKD |
| | | | | DYDFWSGYFDY | QYGSSPLTFG | AKGQPREPQVYTLPPSREEMTKNQVSLTCLVKGFYPSD | STYSLSSTLTLSKADYEKH |
| | | | | WGQGTLVTVSS | GGTKVEIK | IAVEWESNGQPENNYKTTPPVLDSDGSFFLYSKLTVDK | KVYACEVTHQGLSSPVTKS |
| | | | | | | SRWQQGNVFSCSVMHEALHNHYTQKSLSLSPGK | FNRGEC |
| | | | | 1867 | 1868 | 1869 | 1870 |
| 56 | VG9B60 | IgG1 | Kappa | QVQLVQSGAEV | DIVMTQSPGT | QVQLVQSGAEVKKPGASVKVSCKASGYTFTGYYMHWVR | DIVMTQSPGTLSLSPGERA |
| | | | | KKPGASVKVSC | LSLSPGERAT | QAPGQGLEWMGRINPNSGVTHYAQKFQGRVTMTRDTSI | TLSCRASQSFSGSYLAWYQ |
| | | | | KASGYTFTGYY | LSCRASQSFS | STAYMELSRLRSDDTAVYYCARGGSLVRGVISGLDYWG | QKPGQAPSLLIYGASSRAT |
| | | | | MHWVRQAPGQG | GSYLAWYQQK | QGTTVTVSSASTKGPSVFPLAPSSKSTSGGTAALGCLV | GIPDRFSGSGSGTDFTLTI |
| | | | | LEWMGRINPNS | PGQAPSLLIY | KDYFPEPVTVSWNSGALTSGVHTFPAVLQSSGLYSLSS | SRLEPEDFALYYCQQYGSS |
| | | | | GVTHYAQKFQG | GASSRATGIP | VVTVPSSSLGTQTYICNVNHKPSNTKVDKKVEPKSCDK | PPYTFGQGTKVEIKRTVAA |
| | | | | RVTMTRDTSIS | DRFSGSGSGT | THTCPPCPAPELLGGPSVFLFPPKPKDTLMISRTPEVT | PSVFIFPPSDEQLKSGTAS |
| | | | | TAYMELSRLRS | DFTLTISRLE | CVVVDVSHEDPEVKFNWYVDGVEVHNAKTKPREEQYNS | VVCLLNNFYPREAKVQWKV |
| | | | | DDTAVYYCARG | PEDFALYYCQ | TYRVVSVLTVLHQDWLNGKEYKCKVSNKALPAPIEKTI | DNALQSGNSQESVTEQDSK |
| | | | | GSLVRGVISGL | QYGSSPPYTF | SKAKGQPREPQVYTLPPSREEMTKNQVSLTCLVKGFYP | DSTYSLSSTLTLSKADYEK |
| | | | | DYWGQGTTVTV | GQGTKVEIK | SDIAVEWESNGQPENNYKTTPPVLDSDGSFFLYSKLTV | HKVYACEVTHQGLSSPVTK |
| | | | | SS | | DKSRWQQGNVFSCSVMHEALHNHYTQKSLSLSPGK | SFNRGEC |
| | | | | 1901 | 1902 | 1903 | 1904 |
| 57 | VG9B409 | IgG1 | Kappa | EVQLVESGAEV | EIVLTQSPGT | EVQLVESGAEVKKPGASVKVSCKASGYTLTSYYMHWVR | EIVLTQSPGTLSLSPGERA |
| | | | | KKPGASVKVSC | LSLSPGERAT | QAPGQGLEWMGIINPSGGSTSYAQKFQGRVTMTRDTST | TLSCRASQSVTSSYLAWYQ |
| | | | | KASGYTLTSYY | LSCRASQSVT | STVYMELSSLRSEDTAVYYCARGSYGWYFDLWGRGTLV | QKPGQTPRLLIYGASSRAT |
| | | | | MHWVRQAPGQG | SSYLAWYQQK | TVSSASTKGPSVFPLAPSSKSTSGGTAALGCLVKDYFP | GIPDRISGSGSGTDFTLTV |
| | | | | LEWMGIINPSG | PGQTPRLLIY | EPVTVSWNSGALTSGVHTFPAVLQSSGLYSLSSVVTVP | SRLEPEDFAVYYCQQYGSS |
| | | | | GSTSYAQKFQG | GASSRATGIP | SSSLGTQTYICNVNHKPSNTKVDKKVEPKSCDKTHTCP | PPYTFGQGTKLEIKRTVAA |
| | | | | RVTMTRDTSTS | DRISGSGSGT | PCPAPELLGGPSVFLFPPKPKDTLMISRTPEVTCVVVD | PSVFIFPPSDEQLKSGTAS |
| | | | | TVYMELSSLRS | DFTLTVSRLE | VSHEDPEVKFNWYVDGVEVHNAKTKPREEQYNSTYRVV | VVCLLNNFYPREAKVQWKV |
| | | | | EDTAVYYCARG | PEDFAVYYCQ | SVLTVLHQDWLNGKEYKCKVSNKALPAPIEKTISKAKG | DNALQSGNSQESVTEQDSK |
| | | | | SYGWYFDLWGR | QYGSSPPYTF | QPREPQVYTLPPSREEMTKNQVSLTCLVKGFYPSDIAV | DSTYSLSSTLTLSKADYEK |
| | | | | GTLVTVSS | GQGTKLEIK | EWESNGQPENNYKTTPPVLDSDGSFFLYSKLTVDKSRW | HKVYACEVTHQGLSSPVTK |
| | | | | | | QQGNVFSCSVMHEALHNHYTQKSLSLSPGK | SFNRGEC |
| | | | | 1935 | 1936 | 1937 | 1938 |
| 58 | VG9B411 | IgG1 | Kappa | EVQLVESGGGL | EIVMTQSPSS | EVQLVESGGGLVKPGGSLRLSCSASGFTFSNYDMNWVR | EIVMTQSPSSVSASVGDRV |
| | | | | VKPGGSLRLSC | VSASVGDRVT | QAPGKGLEWVSSISSSSSYIYYADSVKGRFTISRDNAK | TITCRASQGINSWLAWYQQ |
| | | | | SASGFTFSNYD | ITCRASQGIN | NSLYLQMNSLRAEDTAVYHCARDVGVTTDYYYYGMDVW | DPYKAPKLLIYAASTLQSG |
| | | | | MNWVRQAPGKG | SWLAWYQQDP | GQGTTVTVSSASTKGPSVFPLAPSSKSTSGGTAALGCL | VPSRFGGRGSGTEFTLTIS |
| | | | | LEWVSSISSSS | YKAPKLLIYA | VKDYFPEPVTVSWNSGALTSGVHTFPAVLQSSGLYSLS | SLQPEDFAVYYCQQYNNWP |
| | | | | SYIYYADSVKG | ASTLQSGVPS | SVVTVPSSSLGTQTYICNVNHKPSNTKVDKKVEPKSCD | RTFGQGTKVDIKRTVAAPS |
| | | | | RFTISRDNAKN | RFGGRGSGTE | KTHTCPPCPAPELLGGPSVFLFPPKPKDTLMISRTPEV | VFIFPPSDEQLKSGTASVV |
| | | | | SLYLQMNSLRA | FTLTISSLQP | TCVVVDVSHEDPEVKFNWYVDGVEVHNAKTKPREEQYN | CLLNNFYPREAKVQWKVDN |
| | | | | EDTAVYHCARD | EDFAVYYCQQ | STYRVVSVLTVLHQDWLNGKEYKCKVSNKALPAPIEKT | ALQSGNSQESVTEQDSKDS |
| | | | | VGVTTDYYYYG | YNNWPRTFGQ | ISKAKGQPREPQVYTLPPSREEMTKNQVSLTCLVKGFY | TYSLSSTLTLSKADYEKHK |
| | | | | MDVWGQGTTVT | GTKVDIK | PSDIAVEWESNGQPENNYKTTPPVLDSDGSFFLYSKLT | VYACEVTHQGLSSPVTKSF |
| | | | | VSS | | VDKSRWQQGNVFSCSVMHEALHNHYTQKSLSLSPGK | NRGEC |
| | | | | 1969 | 1970 | 1971 | 1972 |
| 59 | VG9B129 | IgG1 | Kappa | EVQLVQSGAEV | EIVLTQSPGT | EVQLVQSGAEVKKPGSSVKVSCKASGGTFSSYVISWVR | EIVLTQSPGTLSLSPGERA |
| | | | | KKPGSSVKVSC | LSLSPGERAT | QAPGQGLEWMGGILPILSTANYAQKFQGRVTITADKST | TLSCRASQSVSNNYLAWYQ |
| | | | | KASGGTFSSYV | LSCRASQSVS | STAYMELSSLRSEDTAVYYCARAHDYYYGMDVWGQGTT | QKPGQAPRLLIYGASSRAT |
| | | | | ISWVRQAPGQG | NNYLAWYQQK | VTVSSASTKGPSVFPLAPSSKSTSGGTAALGCLVKDYF | GIPDRFSGSGSGTDFTLTI |
| | | | | LEWMGGILPIL | PGQAPRLLIY | PEPVTVSWNSGALTSGVHTFPAVLQSSGLYSLSSVVTV | SRLEPEDFAVYYCQQYGSS |
| | | | | STANYAQKFQG | GASSRATGIP | PSSSLGTQTYICNVNHKPSNTKVDKKVEPKSCDKTHTC | PPYTFGQGTKVDIKRTVAA |
| | | | | RVTITADKSTS | DRFSGSGSGT | PPCPAPELLGGPSVFLFPPKPKDTLMISRTPEVTCVVV | PSVFIFPPSDEQLKSGTAS |
| | | | | TAYMELSSLRS | DFTLTISRLE | DVSHEDPEVKFNWYVDGVEVHNAKTKPREEQYNSTYRV | VVCLLNNFYPREAKVQWKV |
| | | | | EDTAVYYCARA | PEDFAVYYCQ | VSVLTVLHQDWLNGKEYKCKVSNKALPAPIEKTISKAK | DNALQSGNSQESVTEQDSK |
| | | | | HDYYYGMDVWG | QYGSSPPYTF | GQPREPQVYTLPPSREEMTKNQVSLTCLVKGFYPSDIA | DSTYSLSSTLTLSKADYEK |
| | | | | QGTTVTVSS | GQGTKVDIK | VEWESNGQPENNYKTTPPVLDSDGSFFLYSKLTVDKSR | HKVYACEVTHQGLSSPVTK |
| | | | | | | WQQGNVFSCSVMHEALHNHYTQKSLSLSPGK | SFNRGEC |
| | | | | 2003 | 2004 | 2005 | 2006 |
| 60 | VG9B396 | IgG1 | Lambda | EVQLVESGPGL | QSVLTQAPSV | EVQLVESGPGLVQPSETLSLTCTVSGDSIRGYYWNWIR | QSVLTQAPSVSGAPGQRVT |
| | | | | VQPSETLSLTC | SGAPGQRVTI | QPAGKGLEWIGRIFTTGNTNYNPSLKSRLTMSLDTSKN | ISCTGSSSNIGADYDVKWY |
| | | | | TVSGDSIRGYY | SCTGSSSNIG | QFSLKLNSVTAADTAVYYCAREKWDSSSSALYFDFWGQ | QQLPGTAPKLLIYGNTDRP |
| | | | | WNWIRQPAGKG | ADYDVKWYQQ | GTLVTVSSASTKGPSVFPLAPSSKSTSGGTAALGCLVK | SGVPDRFSGSKSGTSASLA |
| | | | | LEWIGRIFTTG | LPGTAPKLLI | DYFPEPVTVSWNSGALTSGVHTFPAVLQSSGLYSLSSV | ITGLQAEDEADYYCQSYDS |
| | | | | NTNYNPSLKSR | YGNTDRPSGV | VTVPSSSLGTQTYICNVNHKPSNTKVDKKVEPKSCDKT | RLTGYVVFGGGTKLTVLGQ |
| | | | | LTMSLDTSKNQ | PDRFSGSKSG | HTCPPCPAPELLGGPSVFLFPPKPKDTLMISRTPEVTC | PKAAPSVTLFPPSSEELQA |
| | | | | FSLKLNSVTAA | TSASLAITGL | VVVDVSHEDPEVKFNWYVDGVEVHNAKTKPREEQYNST | NKATLVCLISDFYPGAVTV |
| | | | | DTAVYYCAREK | QAEDEADYYC | YRVVSVLTVLHQDWLNGKEYKCKVSNKALPAPIEKTIS | AWKADSSPVKAGVETTTPS |
| | | | | WDSSSSALYFD | QSYDSRLTGY | KAKGQPREPQVYTLPPSREEMTKNQVSLTCLVKGFYPS | KQSNNKYAASSYLSLTPEQ |
| | | | | FWGQGTLVTVS | VVFGGGTKLT | DIAVEWESNGQPENNYKTTPPVLDSDGSFFLYSKLTVD | WKSHRSYSCQVTHEGSTVE |
| | | | | S | VL | KSRWQQGNVFSCSVMHEALHNHYTQKSLSLSPGK | KTVAPTECS |
| | | | | 2037 | 2038 | 2039 | 2040 |
| 61 | VG9B470 | IgG1 | Kappa | QVTLKESGPTL | EIVMTQSPSF | QVTLKESGPTLVKPTQTLTLTCTFSGFSLTTSGVGVGW | EIVMTQSPSFLSASVGDRV |
| | | | | VKPTQTLTLTC | LSASVGDRVT | IRQPPGKALEWLALILWNDHTIYSPSLKSRLTITKDTS | TFTCRASQGISRYLAWYQQ |
| | | | | TFSGFSLTTSG | FTCRASQGIS | KNQVVLTMTNMDPVDTAAYFCARDKWELRDAFDIWGQG | KPGRAPNLLIYVASTLQSG |
| | | | | VGVGWIRQPPG | RYLAWYQQKP | TMVTVSSASTKGPSVFPLAPSSKSTSGGTAALGCLVKD | VPSRFSGSGSGTEFTLTIS |
| | | | | KALEWLALILW | GRAPNLLIYV | YFPEPVTVSWNSGALTSGVHTFPAVLQSSGLYSLSSVV | SLLPEDFATYYCQQLISYP |
| | | | | NDHTIYSPSLK | ASTLQSGVPS | TVPSSSLGTQTYICNVNHKPSNTKVDKKVEPKSCDKTH | YTFSQGTRLEIKRTVAAPS |
| | | | | SRLTITKDTSK | RFSGSGSGTE | TCPPCPAPELLGGPSVFLFPPKPKDTLMISRTPEVTCV | VFIFPPSDEQLKSGTASVV |
| | | | | NQVVLTMTNMD | FTLTISSLLP | VVDVSHEDPEVKFNWYVDGVEVHNAKTKPREEQYNSTY | CLLNNFYPREAKVQWKVDN |
| | | | | PVDTAAYFCAR | EDFATYYCQQ | RVVSVLTVLHQDWLNGKEYKCKVSNKALPAPIEKTISK | ALQSGNSQESVTEQDSKDS |
| | | | | DKWELRDAFDI | LISYPYTFSQ | AKGQPREPQVYTLPPSREEMTKNQVSLTCLVKGFYPSD | TYSLSSTLTLSKADYEKHK |
| | | | | WGQGTMVTVSS | GTRLEIK | IAVEWESNGQPENNYKTTPPVLDSDGSFFLYSKLTVDK | VYACEVTHQGLSSPVTKSF |
| | | | | | | SRWQQGNVFSCSVMHEALHNHYTQKSLSLSPGK | NRGEC |
| | | | | 2071 | 2072 | 2073 | 2074 |
| 62 | VG9B111 | IgG1 | Kappa | QVQLLESGGGL | DIVMTQSPSS | QVQLLESGGGLVKPGGSLRLSCAASGFTFSTYSVNWVR | DIVMTQSPSSLSASVGDRV |
| | | | | VKPGGSLRLSC | LSASVGDRVT | QAPGKGLEWVSSISSDSSYIFYADSMKGRFTISRDNAK | TITCQASQDISHYLNWYQQ |
| | | | | AASGFTFSTYS | ITCQASQDIS | NSLYLHMNSLRAEDTAVYYCARDSVTGPFDYWGQGTLV | KPGKAPKLLIYDSYILETG |
| | | | | VNWVRQAPGKG | HYLNWYQQKP | TVSSASTKGPSVFPLAPSSKSTSGGTAALGCLVKDYFP | VTSRFSGSGSGTDFTFTIN |
| | | | | LEWVSSISSDS | GKAPKLLIYD | EPVTVSWNSGALTSGVHTFPAVLQSSGLYSLSSVVTVP | SLQPEDIAIYYCQQYDNLP |
| | | | | SYIFYADSMKG | SYILETGVTS | SSSLGTQTYICNVNHKPSNTKVDKKVEPKSCDKTHTCP | YTFGQGTKVEIKRTVAAPS |
| | | | | RFTISRDNAKN | RFSGSGSGTD | PCPAPELLGGPSVFLFPPKPKDTLMISRTPEVTCVVVD | VFIFPPSDEQLKSGTASVV |
| | | | | SLYLHMNSLRA | FTFTINSLQP | VSHEDPEVKFNWYVDGVEVHNAKTKPREEQYNSTYRVV | CLLNNFYPREAKVQWKVDN |
| | | | | EDTAVYYCARD | EDIAIYYCQQ | SVLTVLHQDWLNGKEYKCKVSNKALPAPIEKTISKAKG | ALQSGNSQESVTEQDSKDS |
| | | | | SVTGPFDYWGQ | YDNLPYTFGQ | QPREPQVYTLPPSREEMTKNQVSLTCLVKGFYPSDIAV | TYSLSSTLTLSKADYEKHK |
| | | | | GTLVTVSS | GTKVEIK | EWESNGQPENNYKTTPPVLDSDGSFFLYSKLTVDKSRW | VYACEVTHQGLSSPVTKSF |
| | | | | | | QQGNVFSCSVMHEALHNHYTQKSLSLSPGK | NRGEC |
| | | | | 2105 | 2106 | 2107 | 2108 |
| 63 | VG9B169 | IgG1 | Lambda | EVQLLESGPGL | QSALTQPPSA | EVQLLESGPGLVKPSETLSLTCSVSGGSITNYFWNWIR | QSALTQPPSASGTPGQRVT |
| | | | | VKPSETLSLTC | SGTPGQRVTI | QPPGKGLEWIGYIFYSGSTSYNPSLKSRVTISVDTSKN | ISCSGSSSNIGSNTVNWYQ |
| | | | | SVSGGSITNYF | SCSGSSSNIG | RFSLKLISVTAADTAVYYCARVGRWELRTAFDIWGQGT | QLPGTAPKLLIYSNNQRPS |
| | | | | WNWIRQPPGKG | SNTVNWYQQL | MVTVSSASTKGPSVFPLAPSSKSTSGGTAALGCLVKDY | GVPDRFSGSKSGTSASLAI |
| | | | | LEWIGYIFYSG | PGTAPKLLIY | FPEPVTVSWNSGALTSGVHTFPAVLQSSGLYSLSSVVT | SGLQSEDEADYYCAAWDDS |
| | | | | STSYNPSLKSR | SNNQRPSGVP | VPSSSLGTQTYICNVNHKPSNTKVDKKVEPKSCDKTHT | LNGPGVFGGGTKLTVLGQP |
| | | | | VTISVDTSKNR | DRFSGSKSGT | CPPCPAPELLGGPSVFLFPPKPKDTLMISRTPEVTCVV | KAAPSVTLFPPSSEELQAN |
| | | | | FSLKLISVTAA | SASLAISGLQ | VDVSHEDPEVKFNWYVDGVEVHNAKTKPREEQYNSTYR | KATLVCLISDFYPGAVTVA |
| | | | | DTAVYYCARVG | SEDEADYYCA | VVSVLTVLHQDWLNGKEYKCKVSNKALPAPIEKTISKA | WKADSSPVKAGVETTTPSK |
| | | | | RWELRTAFDIW | AWDDSLNGPG | KGQPREPQVYTLPPSREEMTKNQVSLTCLVKGFYPSDI | QSNNKYAASSYLSLTPEQW |
| | | | | GQGTMVTVSS | VFGGGTKLTV | AVEWESNGQPENNYKTTPPVLDSDGSFFLYSKLTVDKS | KSHRSYSCQVTHEGSTVEK |
| | | | | | L | RWQQGNVFSCSVMHEALHNHYTQKSLSLSPGK | TVAPTECS |
| | | | | 2139 | 2140 | 2141 | 2142 |
| 64 | VG9B639 | IgG1 | Kappa | QVQLVQSGGGL | DIQMTQSPSS | QVQLVQSGGGLVKPGGSLRLSCAASGFTFTTYRMNWVR | DIQMTQSPSSLSASVGDRV |
| | | | | VKPGGSLRLSC | LSASVGDRVT | QAPGKGLEWVSSISSSSIYIHSADSVKGRFTISRDNAK | TITCQASQDISHYLNWYQQ |
| | | | | AASGFTFTTYR | ITCQASQDIS | NSLYLQMNSLRAEDSAIYYCARERVYTVSFDYWGQGTL | KPGKAPKLLIYDSYILETG |
| | | | | MNWVRQAPGKG | HYLNWYQQKP | VTVSSASTKGPSVFPLAPSSKSTSGGTAALGCLVKDYF | VTSRFSGSGSGTDFTFTIN |
| | | | | LEWVSSISSSS | GKAPKLLIYD | PEPVTVSWNSGALTSGVHTFPAVLQSSGLYSLSSVVTV | SLQPEDIAIYYCQQYDNLP |
| | | | | IYIHSADSVKG | SYILETGVTS | PSSSLGTQTYICNVNHKPSNTKVDKKVEPKSCDKTHTC | YTFGQGTKVEIKRTVAAPS |
| | | | | RFTISRDNAKN | RFSGSGSGTD | PPCPAPELLGGPSVFLFPPKPKDTLMISRTPEVTCVVV | VFIFPPSDEQLKSGTASVV |
| | | | | SLYLQMNSLRA | FTFTINSLQP | DVSHEDPEVKFNWYVDGVEVHNAKTKPREEQYNSTYRV | CLLNNFYPREAKVQWKVDN |
| | | | | EDSAIYYCARE | EDIAIYYCQQ | VSVLTVLHQDWLNGKEYKCKVSNKALPAPIEKTISKAK | ALQSGNSQESVTEQDSKDS |
| | | | | RVYTVSFDYWG | YDNLPYTFGQ | GQPREPQVYTLPPSREEMTKNQVSLTCLVKGFYPSDIA | TYSLSSTLTLSKADYEKHK |
| | | | | QGTLVTVSS | GTKVEIK | VEWESNGQPENNYKTTPPVLDSDGSFFLYSKLTVDKSR | VYACEVTHQGLSSPVTKSF |
| | | | | | | WQQGNVFSCSVMHEALHNHYTQKSLSLSPGK | NRGEC |
| | | | | 2173 | 2174 | 2175 | 2176 |
| 65 | VG9B201 | IgG1 | Lambda | QVTLKESGPTL | QLVLTQPPSV | QVTLKESGPTLVKPTQTLTLTCTFSGFSLTTHGVGVGW | QLVLTQPPSVSAAPGQKVT |
| | | | | VKPTQTLTLTC | SAAPGQKVTI | IRQPPRKALEWLALIYWNADKHYSPSLKSRLTITKDTS | ISCSGSSSNIGNNDVSWYQ |
| | | | | TFSGFSLTTHG | SCSGSSSNIG | KNQVVLTMTHMDPVDTATYYCAHEGDWGHYFDFWGQGT | QLPGTAPKLLIYDNNRRPS |
| | | | | VGVGWIRQPPR | NNDVSWYQQL | LVTVSSASTKGPSVFPLAPSSKSTSGGTAALGCLVKDY | GIPDRFSGSKSGTSATLGI |
| | | | | KALEWLALIYW | PGTAPKLLIY | FPEPVTVSWNSGALTSGVHTFPAVLQSSGLYSLSSVVT | TGLQTGDEADYYCETWDSS |
| | | | | NADKHYSPSLK | DNNRRPSGIP | VPSSSLGTQTYICNVNHKPSNTKVDKKVEPKSCDKTHT | LSAIWVFGGGTKVTVLGQP |
| | | | | SRLTITKDTSK | DRFSGSKSGT | CPPCPAPELLGGPSVFLFPPKPKDTLMISRTPEVTCVV | KAAPSVTLFPPSSEELQAN |
| | | | | NQVVLTMTHMD | SATLGITGLQ | VDVSHEDPEVKFNWYVDGVEVHNAKTKPREEQYNSTYR | KATLVCLISDFYPGAVTVA |
| | | | | PVDTATYYCAH | TGDEADYYCE | VVSVLTVLHQDWLNGKEYKCKVSNKALPAPIEKTISKA | WKADSSPVKAGVETTTPSK |
| | | | | EGDWGHYFDFW | TWDSSLSAIW | KGQPREPQVYTLPPSREEMTKNQVSLTCLVKGFYPSDI | QSNNKYAASSYLSLTPEQW |
| | | | | GQGTLVTVSS | VFGGGTKVTV | AVEWESNGQPENNYKTTPPVLDSDGSFFLYSKLTVDKS | KSHRSYSCQVTHEGSTVEK |
| | | | | | L | RWQQGNVFSCSVMHEALHNHYTQKSLSLSPGK | TVAPTECS |
| | | | | 2207 | 2208 | 2209 | 2210 |
| 66 | VG9B161 | IgG1 | Lambda | QVQLQESGPGL | QPVLTQSSSA | QVQLQESGPGLVKPSETLSLTCTVSGGSISSYFWSWIR | QPVLTQSSSASGTPGQRVT |
| | | | | VKPSETLSLTC | SGTPGQRVTI | QPPGKGLEWIGYIFYSGSTNYNPSLKSRVTILVDTSKN | ISCSGSSSNIGSNTVNWYQ |
| | | | | TVSGGSISSYF | SCSGSSSNIG | HFSLKLSSVTAADTAVYYCARVGRWELRGAFDIWGQGT | QFPGTAPKLLIYSNNQRPS |
| | | | | WSWIRQPPGKG | SNTVNWYQQF | MVTVSSASTKGPSVFPLAPSSKSTSGGTAALGCLVKDY | GVPDRFSGSKSGTSASLAI |
| | | | | LEWIGYIFYSG | PGTAPKLLIY | FPEPVTVSWNSGALTSGVHTFPAVLQSSGLYSLSSVVT | SGLQSEDEAEYYCAAWDDS |
| | | | | STNYNPSLKSR | SNNQRPSGVP | VPSSSLGTQTYICNVNHKPSNTKVDKKVEPKSCDKTHT | LNSPGVFGGGTKLTVLGQP |
| | | | | VTILVDTSKNH | DRFSGSKSGT | CPPCPAPELLGGPSVFLFPPKPKDTLMISRTPEVTCVV | KAAPSVTLFPPSSEELQAN |
| | | | | FSLKLSSVTAA | SASLAISGLQ | VDVSHEDPEVKFNWYVDGVEVHNAKTKPREEQYNSTYR | KATLVCLISDFYPGAVTVA |
| | | | | DTAVYYCARVG | SEDEAEYYCA | VVSVLTVLHQDWLNGKEYKCKVSNKALPAPIEKTISKA | WKADSSPVKAGVETTTPSK |
| | | | | RWELRGAFDIW | AWDDSLNSPG | KGQPREPQVYTLPPSREEMTKNQVSLTCLVKGFYPSDI | QSNNKYAASSYLSLTPEQW |
| | | | | GQGTMVTVSS | VFGGGTKLTV | AVEWESNGQPENNYKTTPPVLDSDGSFFLYSKLTVDKS | KSHRSYSCQVTHEGSTVEK |
| | | | | | L | RWQQGNVFSCSVMHEALHNHYTQKSLSLSPGK | TVAPTECS |
| | | | | 2241 | 2242 | 2243 | 2244 |
| 67 | VG9B383 | IgG1 | Lambda | QVQLQESGPGL | SSELTQPASV | QVQLQESGPGLVKPSETLSLTCTVSSGSISSYYWNWIR | SSELTQPASVSGSPGQSIT |
| | | | | VKPSETLSLTC | SGSPGQSITI | QPAGKGLEWVGRIYTIGNTNYNPSLKSRVTMSIDTSKN | ISCTGTSNDVGSYNLVSWY |
| | | | | TVSSGSISSYY | SCTGTSNDVG | QFSLNLSSVTAADTAVYFCAREGYYDSSGSFFPGAFGI | QQHPGKAPKLMIYAGSKRP |
| | | | | WNWIRQPAGKG | SYNLVSWYQQ | WGQGTMVTVSSASTKGPSVFPLAPSSKSTSGGTAALGC | SGISNRFSGSKSGNTASLT |
| | | | | LEWVGRIYTIG | HPGKAPKLMI | LVKDYFPEPVTVSWNSGALTSGVHTFPAVLQSSGLYSL | ISGLQAEDEADYYCCSFAG |
| | | | | NTNYNPSLKSR | YAGSKRPSGI | SSVVTVPSSSLGTQTYICNVNHKPSNTKVDKKVEPKSC | ATNVVFGGGTKLTVLGQPK |
| | | | | VTMSIDTSKNQ | SNRFSGSKSG | DKTHTCPPCPAPELLGGPSVFLFPPKPKDTLMISRTPE | AAPSVTLFPPSSEELQANK |
| | | | | FSLNLSSVTAA | NTASLTISGL | VTCVVVDVSHEDPEVKFNWYVDGVEVHNAKTKPREEQY | ATLVCLISDFYPGAVTVAW |
| | | | | DTAVYFCAREG | QAEDEADYYC | NSTYRVVSVLTVLHQDWLNGKEYKCKVSNKALPAPIEK | KADSSPVKAGVETTTPSKQ |
| | | | | YYDSSGSFFPG | CSFAGATNVV | TISKAKGQPREPQVYTLPPSREEMTKNQVSLTCLVKGF | SNNKYAASSYLSLTPEQWK |
| | | | | AFGIWGQGTMV | FGGGTKLTVL | YPSDIAVEWESNGQPENNYKTTPPVLDSDGSFFLYSKL | SHRSYSCQVTHEGSTVEKT |
| | | | | TVSS | | TVDKSRWQQGNVFSCSVMHEALHNHYTQKSLSLSPGK | VAPTECS |
| | | | | 2275 | 2276 | 2277 | 2278 |
| 68 | VG9B382 | IgG1 | Lambda | QVQLQESGPGL | QSVLTQPPSV | QVQLQESGPGLVKPSETLSLTCTVSGDSISGYYWNYIR | QSVLTQPPSVSGAPGQRVT |
| | | | | VKPSETLSLTC | SGAPGQRVTI | QPAGKGLDWIGRIFTTGNTNYNPSLKSRVTMSVDTSKN | ISCTGSSSNIGADYDIKWY |
| | | | | TVSGDSISGYY | SCTGSSSNIG | QFSLKLTSVTAADTAVYYCARERWDSSSSALYFDYWGQ | QQLPGTAPKLLIYGNSNRP |
| | | | | WNYIRQPAGKG | ADYDIKWYQQ | GTLVTVSSASTKGPSVFPLAPSSKSTSGGTAALGCLVK | SGVPDRFSGSKSGTSVSLA |
| | | | | LDWIGRIFTTG | LPGTAPKLLI | DYFPEPVTVSWNSGALTSGVHTFPAVLQSSGLYSLSSV | ITGLQAEDEADYYCQSYDS |
| | | | | NTNYNPSLKSR | YGNSNRPSGV | VTVPSSSLGTQTYICNVNHKPSNTKVDKKVEPKSCDKT | SMSGYVVFGGGTKLTVLGQ |
| | | | | VTMSVDTSKNQ | PDRFSGSKSG | HTCPPCPAPELLGGPSVFLFPPKPKDTLMISRTPEVTC | PKAAPSVTLFPPSSEELQA |
| | | | | FSLKLTSVTAA | TSVSLAITGL | VVVDVSHEDPEVKFNWYVDGVEVHNAKTKPREEQYNST | NKATLVCLISDFYPGAVTV |
| | | | | DTAVYYCARER | QAEDEADYYC | YRVVSVLTVLHQDWLNGKEYKCKVSNKALPAPIEKTIS | AWKADSSPVKAGVETTTPS |
| | | | | WDSSSSALYFD | QSYDSSMSGY | KAKGQPREPQVYTLPPSREEMTKNQVSLTCLVKGFYPS | KQSNNKYAASSYLSLTPEQ |
| | | | | YWGQGTLVTVS | VVFGGGTKLT | DIAVEWESNGQPENNYKTTPPVLDSDGSFFLYSKLTVD | WKSHRSYSCQVTHEGSTVE |
| | | | | S | VL | KSRWQQGNVFSCSVMHEALHNHYTQKSLSLSPGK | KTVAPTECS |
| | | | | 2309 | 2310 | 2311 | 2312 |
| 69 | VG9B156 | IgG1 | Lambda | QVQLQESGPGL | QLVLTQPPSA | QVQLQESGPGLMKPSETLSLTCTVSNGSISGYFWNWIR | QLVLTQPPSASGTPGQRVT |
| | | | | MKPSETLSLTC | SGTPGQRVTI | QPPGKGLEWIGYIFYSGSTNYNPSLKSRVTISVDTSKN | ISCSGSTSNIGSDTVNWYQ |
| | | | | TVSNGSISGYF | SCSGSTSNIG | LVSLKLNSVTAADTAVYFCAKLGKWELRTAFDIWGQGT | QLPGTAPKLLIYSNNQRPS |
| | | | | WNWIRQPPGKG | SDTVNWYQQL | MVTVSSASTKGPSVFPLAPSSKSTSGGTAALGCLVKDY | GVPDRFSGSKSGTSASLAI |
| | | | | LEWIGYIFYSG | PGTAPKLLIY | FPEPVTVSWNSGALTSGVHTFPAVLQSSGLYSLSSVVT | SGLQSEDETDYYCAAWDDS |
| | | | | STNYNPSLKSR | SNNQRPSGVP | VPSSSLGTQTYICNVNHKPSNTKVDKKVEPKSCDKTHT | LNGPVFGGGTKVTVLGQPK |
| | | | | VTISVDTSKNL | DRFSGSKSGT | CPPCPAPELLGGPSVFLFPPKPKDTLMISRTPEVTCVV | AAPSVTLFPPSSEELQANK |
| | | | | VSLKLNSVTAA | SASLAISGLQ | VDVSHEDPEVKFNWYVDGVEVHNAKTKPREEQYNSTYR | ATLVCLISDFYPGAVTVAW |
| | | | | DTAVYFCAKLG | SEDETDYYCA | VVSVLTVLHQDWLNGKEYKCKVSNKALPAPIEKTISKA | KADSSPVKAGVETTTPSKQ |
| | | | | KWELRTAFDIW | AWDDSLNGPV | KGQPREPQVYTLPPSREEMTKNQVSLTCLVKGFYPSDI | SNNKYAASSYLSLTPEQWK |
| | | | | GQGTMVTVSS | FGGGTKVTVL | AVEWESNGQPENNYKTTPPVLDSDGSFFLYSKLTVDKS | SHRSYSCQVTHEGSTVEKT |
| | | | | | | RWQQGNVFSCSVMHEALHNHYTQKSLSLSPGK | VAPTECS |
| | | | | 2343 | 2344 | 2345 | 2346 |
| 70 | VG9B205 | IgG1 | Lambda | QVQLVQSGPGL | SSELTQPPSV | QVQLVQSGPGLMKPSETLSLTCTVSNGSISGYFWNWIR | SSELTQPPSVSVSPGQTAS |
| | | | | MKPSETLSLTC | SVSPGQTASI | QPPGKGLEWIGYIFYSGSTNYNPSLKSRVTISVDTSKN | ITCSGDKLGDKYACWYQQK |
| | | | | TVSNGSISGYF | TCSGDKLGDK | LVSLKLNSVTAADTAVYFCAKLGKWELRTAFDIWGQGT | PGQSPVLVIYQDSKRPSGI |
| | | | | WNWIRQPPGKG | YACWYQQKPG | MVTVSSASTKGPSVFPLAPSSKSTSGGTAALGCLVKDY | PERFSGSNSGNTATLTISG |
| | | | | LEWIGYIFYSG | QSPVLVIYQD | FPEPVTVSWNSGALTSGVHTFPAVLQSSGLYSLSSVVT | TQAMDEADYYCQAWDSSTV |
| | | | | STNYNPSLKSR | SKRPSGIPER | VPSSSLGTQTYICNVNHKPSNTKVDKKVEPKSCDKTHT | VFGGGTKLTVLGQPKAAPS |
| | | | | VTISVDTSKNL | FSGSNSGNTA | CPPCPAPELLGGPSVFLFPPKPKDTLMISRTPEVTCVV | VTLFPPSSEELQANKATLV |
| | | | | VSLKLNSVTAA | TLTISGTQAM | VDVSHEDPEVKFNWYVDGVEVHNAKTKPREEQYNSTYR | CLISDFYPGAVTVAWKADS |
| | | | | DTAVYFCAKLG | DEADYYCQAW | VVSVLTVLHQDWLNGKEYKCKVSNKALPAPIEKTISKA | SPVKAGVETTTPSKQSNNK |
| | | | | KWELRTAFDIW | DSSTVVFGGG | KGQPREPQVYTLPPSREEMTKNQVSLTCLVKGFYPSDI | YAASSYLSLTPEQWKSHRS |
| | | | | GQGTMVTVSS | TKLTVL | AVEWESNGQPENNYKTTPPVLDSDGSFFLYSKLTVDKS | YSCQVTHEGSTVEKTVAPT |
| | | | | | | RWQQGNVFSCSVMHEALHNHYTQKSLSLSPGK | ECS |
| | | | | 2377 | 2378 | 2379 | 2380 |
| 71 | VG9B86 | IgG1 | Kappa | QVQLQESGPGL | EIVLTQSPAT | QVQLQESGPGLVKPSETLSLTCTVSGDSISSSYWSWIR | EIVLTQSPATLSLSPGERA |
| | | | | VKPSETLSLTC | LSLSPGERAT | QPAGKGLECIGRFYSSGSTSYNPSLKSRVTMAIDTSKN | TLSCRASQSVSSYLAWYQQ |
| | | | | TVSGDSISSSY | LSCRASQSVS | QFSLKLTSVTAADTAVYYCARYSGSYWYFDLWGRGTTV | RPGQAPRLLIYDTSNRATG |
| | | | | WSWIRQPAGKG | SYLAWYQQRP | TVSSASTKGPSVFPLAPSSKSTSGGTAALGCLVKDYFP | IPARFSGSGSGTDFTLTIS |
| | | | | LECIGRFYSSG | GQAPRLLIYD | EPVTVSWNSGALTSGVHTFPAVLQSSGLYSLSSVVTVP | SLAPEDFAVYYCQQRSDWL |
| | | | | STSYNPSLKSR | TSNRATGIPA | SSSLGTQTYICNVNHKPSNTKVDKKVEPKSCDKTHTCP | LTFGGGTKVEIKRTVAAPS |
| | | | | VTMAIDTSKNQ | RFSGSGSGTD | PCPAPELLGGPSVFLFPPKPKDTLMISRTPEVTCVVVD | VFIFPPSDEQLKSGTASVV |
| | | | | FSLKLTSVTAA | FTLTISSLAP | VSHEDPEVKFNWYVDGVEVHNAKTKPREEQYNSTYRVV | CLLNNFYPREAKVQWKVDN |
| | | | | DTAVYYCARYS | EDFAVYYCQQ | SVLTVLHQDWLNGKEYKCKVSNKALPAPIEKTISKAKG | ALQSGNSQESVTEQDSKDS |
| | | | | GSYWYFDLWGR | RSDWLLTFGG | QPREPQVYTLPPSREEMTKNQVSLTCLVKGFYPSDIAV | TYSLSSTLTLSKADYEKHK |
| | | | | GTTVTVSS | GTKVEIK | EWESNGQPENNYKTTPPVLDSDGSFFLYSKLTVDKSRW | VYACEVTHQGLSSPVTKSF |
| | | | | | | QQGNVFSCSVMHEALHNHYTQKSLSLSPGK | NRGEC |
| | | | | 2411 | 2412 | 2413 | 2414 |
| 72 | VG9B154 | IgG1 | Lambda | QVQLQESGPGL | QSALTQPPSA | QVQLQESGPGLVKPSETLSLTCTVSGGSISYYFWNWIR | QSALTQPPSASGTPGQRVT |
| | | | | VKPSETLSLTC | SGTPGQRVTI | QPPGKGLEWIGYIYYSGSTNYNPSLKSRVTISLDTSKN | ISCSGSSSNIGSNTVNWYQ |
| | | | | TVSGGSISYYF | SCSGSSSNIG | QFSLKLSSVTAADTAVYYCAREGKWELRTTFDIWGQGT | QLPGTAPKLLIYSNNQRPS |
| | | | | WNWIRQPPGKG | SNTVNWYQQL | MVTVSSASTKGPSVFPLAPSSKSTSGGTAALGCLVKDY | GVPDRFSGSKSGTSASLAI |
| | | | | LEWIGYIYYSG | PGTAPKLLIY | FPEPVTVSWNSGALTSGVHTFPAVLQSSGLYSLSSVVT | SGLQSEDEADYYCAAWDDS |
| | | | | STNYNPSLKSR | SNNQRPSGVP | VPSSSLGTQTYICNVNHKPSNTKVDKKVEPKSCDKTHT | LNGPVFGGGTKLTVLGQPK |
| | | | | VTISLDTSKNQ | DRFSGSKSGT | CPPCPAPELLGGPSVFLFPPKPKDTLMISRTPEVTCVV | AAPSVTLFPPSSEELQANK |
| | | | | FSLKLSSVTAA | SASLAISGLQ | VDVSHEDPEVKFNWYVDGVEVHNAKTKPREEQYNSTYR | ATLVCLISDFYPGAVTVAW |
| | | | | DTAVYYCAREG | SEDEADYYCA | VVSVLTVLHQDWLNGKEYKCKVSNKALPAPIEKTISKA | KADSSPVKAGVETTTPSKQ |
| | | | | KWELRTTFDIW | AWDDSLNGPV | KGQPREPQVYTLPPSREEMTKNQVSLTCLVKGFYPSDI | SNNKYAASSYLSLTPEQWK |
| | | | | GQGTMVTVSS | FGGGTKLTVL | AVEWESNGQPENNYKTTPPVLDSDGSFFLYSKLTVDKS | SHRSYSCQVTHEGSTVEKT |
| | | | | | | RWQQGNVFSCSVMHEALHNHYTQKSLSLSPGK | VAPTECS |
| | | | | 2445 | 2446 | 2447 | 2448 |
| 73 | VG9B159 | IgG1 | Lambda | EVQLVQSGPGL | SYELMQPPSV | EVQLVQSGPGLVKPSETLSLTCTVSGGSISSYYWSWIR | SYELMQPPSVSVAPGQTAR |
| | | | | VKPSETLSLTC | SVAPGQTARI | QPAGKGLEWIGRFYTGGRNNYNPSFKSRVTMSVDTSQN | ITCGGNNIGSKSVHWYQQK |
| | | | | TVSGGSISSYY | TCGGNNIGSK | QFSLKLSSVTAADTAVYYCARDMEYYYDRSGYSYWYFD | PGQAPVLVVYDDSDRPSGI |
| | | | | WSWIRQPAGKG | SVHWYQQKPG | LWGRGTTVTVSSASTKGPSVFPLAPSSKSTSGGTAALG | PERFSGSNSGNTATLTISR |
| | | | | LEWIGRFYTGG | QAPVLVVYDD | CLVKDYFPEPVTVSWNSGALTSGVHTFPAVLQSSGLYS | VEAGDEADYYCQVWDSSSD |
| | | | | RNNYNPSFKSR | SDRPSGIPER | LSSVVTVPSSSLGTQTYICNVNHKPSNTKVDKKVEPKS | HVVFGGGTKLTVLGQPKAA |
| | | | | VTMSVDTSQNQ | FSGSNSGNTA | CDKTHTCPPCPAPELLGGPSVFLFPPKPKDTLMISRTP | PSVTLFPPSSEELQANKAT |
| | | | | FSLKLSSVTAA | TLTISRVEAG | EVTCVVVDVSHEDPEVKFNWYVDGVEVHNAKTKPREEQ | LVCLISDFYPGAVTVAWKA |
| | | | | DTAVYYCARDM | DEADYYCQVW | YNSTYRVVSVLTVLHQDWLNGKEYKCKVSNKALPAPIE | DSSPVKAGVETTTPSKQSN |
| | | | | EYYYDRSGYSY | DSSSDHVVFG | KTISKAKGQPREPQVYTLPPSREEMTKNQVSLTCLVKG | NKYAASSYLSLTPEQWKSH |
| | | | | WYFDLWGRGTT | GGTKLTVL | FYPSDIAVEWESNGQPENNYKTTPPVLDSDGSFFLYSK | RSYSCQVTHEGSTVEKTVA |
| | | | | VTVSS | | LTVDKSRWQQGNVFSCSVMHEALHNHYTQKSLSLSPGK | PTECS |
| | | | | 2479 | 2480 | 2481 | 2482 |
| 74 | VG9B465 | IgG1 | Lambda | QVQLQQSGPGL | SSELTQPASV | QVQLQQSGPGLVKPSETLSLTCTVSGGSITSYYWNWIR | SSELTQPASVSGSPGQSIT |
| | | | | VKPSETLSLTC | SGSPGQSITI | QPAGKGLEWIGRIYTIGNTNYNPSLKSRVTMSIDTSKH | ISCTGTSNDVGSYNLVSWY |
| | | | | TVSGGSITSYY | SCTGTSNDVG | QFSLKLSSVTGADTAVYYCAREGYYESDGSFFPGAFNI | QQHPGKAPKLMIYAGSKRP |
| | | | | WNWIRQPAGKG | SYNLVSWYQQ | WGQGTMVTVSSASTKGPSVFPLAPSSKSTSGGTAALGC | SGISNRFSGSKSGNTASLT |
| | | | | LEWIGRIYTIG | HPGKAPKLMI | LVKDYFPEPVTVSWNSGALTSGVHTFPAVLQSSGLYSL | ISGLQAEDEADYYCCSYAG |
| | | | | NTNYNPSLKSR | YAGSKRPSGI | SSVVTVPSSSLGTQTYICNVNHKPSNTKVDKKVEPKSC | TTNVVFGGGTKVTVLGQPK |
| | | | | VTMSIDTSKHQ | SNRFSGSKSG | DKTHTCPPCPAPELLGGPSVFLFPPKPKDTLMISRTPE | AAPSVTLFPPSSEELQANK |
| | | | | FSLKLSSVTGA | NTASLTISGL | VTCVVVDVSHEDPEVKFNWYVDGVEVHNAKTKPREEQY | ATLVCLISDFYPGAVTVAW |
| | | | | DTAVYYCAREG | QAEDEADYYC | NSTYRVVSVLTVLHQDWLNGKEYKCKVSNKALPAPIEK | KADSSPVKAGVETTTPSKQ |
| | | | | YYESDGSFFPG | CSYAGTTNVV | TISKAKGQPREPQVYTLPPSREEMTKNQVSLTCLVKGF | SNNKYAASSYLSLTPEQWK |
| | | | | AFNIWGQGTMV | FGGGTKVTVL | YPSDIAVEWESNGQPENNYKTTPPVLDSDGSFFLYSKL | SHRSYSCQVTHEGSTVEKT |
| | | | | TVSS | | TVDKSRWQQGNVFSCSVMHEALHNHYTQKSLSLSPGK | VAPTECS |
| | | | | 2513 | 2514 | 2515 | 2516 |
| 75 | VG9B194 | IgG1 | Lambda | EVQLLESGAEV | QSVLTQPPSA | EVQLLESGAEVKKPGASVKVSCKASGYTFTGDYMHWVR | QSVLTQPPSASGSPGQSVT |
| | | | | KKPGASVKVSC | SGSPGQSVTI | QAPGQGLEWMGWINPNSGYTNNAEKFQGRVTMTRDTSI | ISCTGTSSDVGGYNYVSWY |
| | | | | KASGYTFTGDY | SCTGTSSDVG | STAYMELSRLSSDDTAVYYCTRELDALDVWGQGTMVTV | QQHPGKAPKLMIYEVSKRP |
| | | | | MHWVRQAPGQG | GYNYVSWYQQ | SSASTKGPSVFPLAPSSKSTSGGTAALGCLVKDYFPEP | SGVPDRFSGSKSGNTASLT |
| | | | | LEWMGWINPNS | HPGKAPKLMI | VTVSWNSGALTSGVHTFPAVLQSSGLYSLSSVVTVPSS | VSGLQAEDEADYYCNSYAG |
| | | | | GYTNNAEKFQG | YEVSKRPSGV | SLGTQTYICNVNHKPSNTKVDKKVEPKSCDKTHTCPPC | SNNFEVFGGGTKVTVLGQP |
| | | | | RVTMTRDTSIS | PDRFSGSKSG | PAPELLGGPSVFLFPPKPKDTLMISRTPEVTCVVVDVS | KAAPSVTLFPPSSEELQAN |
| | | | | TAYMELSRLSS | NTASLTVSGL | HEDPEVKFNWYVDGVEVHNAKTKPREEQYNSTYRVVSV | KATLVCLISDFYPGAVTVA |
| | | | | DDTAVYYCTRE | QAEDEADYYC | LTVLHQDWLNGKEYKCKVSNKALPAPIEKTISKAKGQP | WKADSSPVKAGVETTTPSK |
| | | | | LDALDVWGQGT | NSYAGSNNFE | REPQVYTLPPSREEMTKNQVSLTCLVKGFYPSDIAVEW | QSNNKYAASSYLSLTPEQW |
| | | | | MVTVSS | VFGGGTKVTV | ESNGQPENNYKTTPPVLDSDGSFFLYSKLTVDKSRWQQ | KSHRSYSCQVTHEGSTVEK |
| | | | | | L | GNVFSCSVMHEALHNHYTQKSLSLSPGK | TVAPTECS |
| | | | | 2547 | 2548 | 2549 | 2550 |
| 76 | VG9B182 | IgG1 | Lambda | QVQLVESGPGL | QSALTQPPSA | QVQLVESGPGLVKPSETLSLTCTVSGDSINNHFWSWIR | QSALTQPPSASGTPGQRVT |
| | | | | VKPSETLSLTC | SGTPGQRVTI | QPPGKGLEWIGFVFYNGNTNYNPSLKSRVTISIDTSKS | ISCSGSSSNIGSNTVNWYQ |
| | | | | TVSGDSINNHF | SCSGSSSNIG | QFSLKLTSVTAADTAVYYCARVGRWVLRTAFDIWGQGT | QLPGTAPKLLIYSNNQRPS |
| | | | | WSWIRQPPGKG | SNTVNWYQQL | MVTVSSASTKGPSVFPLAPSSKSTSGGTAALGCLVKDY | GVPARFSGSKSGTSASLAI |
| | | | | LEWIGFVFYNG | PGTAPKLLIY | FPEPVTVSWNSGALTSGVHTFPAVLQSSGLYSLSSVVT | SGLQSEDEADYYCAAWDDS |
| | | | | NTNYNPSLKSR | SNNQRPSGVP | VPSSSLGTQTYICNVNHKPSNTKVDKKVEPKSCDKTHT | LNGPGVFGGGTKLTVLGQP |
| | | | | VTISIDTSKSQ | ARFSGSKSGT | CPPCPAPELLGGPSVFLFPPKPKDTLMISRTPEVTCVV | KAAPSVTLFPPSSEELQAN |
| | | | | FSLKLTSVTAA | SASLAISGLQ | VDVSHEDPEVKFNWYVDGVEVHNAKTKPREEQYNSTYR | KATLVCLISDFYPGAVTVA |
| | | | | DTAVYYCARVG | SEDEADYYCA | VVSVLTVLHQDWLNGKEYKCKVSNKALPAPIEKTISKA | WKADSSPVKAGVETTTPSK |
| | | | | RWVLRTAFDIW | AWDDSLNGPG | KGQPREPQVYTLPPSREEMTKNQVSLTCLVKGFYPSDI | QSNNKYAASSYLSLTPEQW |
| | | | | GQGTMVTVSS | VFGGGTKLTV | AVEWESNGQPENNYKTTPPVLDSDGSFFLYSKLTVDKS | KSHRSYSCQVTHEGSTVEK |
| | | | | | L | RWQQGNVFSCSVMHEALHNHYTQKSLSLSPGK | TVAPTECS |
| | | | | 2581 | 2582 | 2583 | 2584 |
| 77 | VG9B173 | IgG1 | Lambda | QVQLQESGPGL | QSVLTQPPSA | QVQLQESGPGLVKPSETLSLTCTVSGGSINNYFWSWIR | QSVLTQPPSASGTPGQRVT |
| | | | | VKPSETLSLTC | SGTPGQRVTI | QPPGKGLEWIGYIYYSGSTNYNPSLKSRVTISVVTSMN | ISCSGSSSNIESNTVNWYQ |
| | | | | TVSGGSINNYF | SCSGSSSNIE | QFSLKLSSVTAADTAVYYCAREGKWELRSAFDIWGQGT | QLPRTAPKLLIYSNNQRPS |
| | | | | WSWIRQPPGKG | SNTVNWYQQL | MVTVSSASTKGPSVFPLAPSSKSTSGGTAALGCLVKDY | GVPDRFSGSKSGTSASLAI |
| | | | | LEWIGYIYYSG | PRTAPKLLIY | FPEPVTVSWNSGALTSGVHTFPAVLQSSGLYSLSSVVT | SGLQSEDEADYYCTAWDDS |
| | | | | STNYNPSLKSR | SNNQRPSGVP | VPSSSLGTQTYICNVNHKPSNTKVDKKVEPKSCDKTHT | LNGPVFGGGTKVTVLGQPK |
| | | | | VTISVVTSMNQ | DRFSGSKSGT | CPPCPAPELLGGPSVFLFPPKPKDTLMISRTPEVTCVV | AAPSVTLFPPSSEELQANK |
| | | | | FSLKLSSVTAA | SASLAISGLQ | VDVSHEDPEVKFNWYVDGVEVHNAKTKPREEQYNSTYR | ATLVCLISDFYPGAVTVAW |
| | | | | DTAVYYCAREG | SEDEADYYCT | VVSVLTVLHQDWLNGKEYKCKVSNKALPAPIEKTISKA | KADSSPVKAGVETTTPSKQ |
| | | | | KWELRSAFDIW | AWDDSLNGPV | KGQPREPQVYTLPPSREEMTKNQVSLTCLVKGFYPSDI | SNNKYAASSYLSLTPEQWK |
| | | | | GQGTMVTVSS | FGGGTKVTVL | AVEWESNGQPENNYKTTPPVLDSDGSFFLYSKLTVDKS | SHRSYSCQVTHEGSTVEKT |
| | | | | | | RWQQGNVFSCSVMHEALHNHYTQKSLSLSPGK | VAPTECS |
| | | | | 2615 | 2616 | 2617 | 2618 |
| 78 | VG9B87 | IgG1 | Kappa | QVQLVESGAEV | EIVLTQSPSF | QVQLVESGAEVKKPGASVKVSCKASGYTFTSEYIHWVR | EIVLTQSPSFLSASAGDRV |
| | | | | KKPGASVKVSC | LSASAGDRVT | QAPGQGLEWMGIINPSGGSTSYAQRFQGRVTMTRDTST | TITCRASQGISSYLAWYQQ |
| | | | | KASGYTFTSEY | ITCRASQGIS | STVYMEVNSLRSEDTAVYYCARERGYSYGSFDYWGQGT | KPEKAPKLLIYAASTLQSG |
| | | | | IHWVRQAPGQG | SYLAWYQQKP | LVTVSSASTKGPSVFPLAPSSKSTSGGTAALGCLVKDY | VPSRFSGSGSGTEFTLTIS |
| | | | | LEWMGIINPSG | EKAPKLLIYA | FPEPVTVSWNSGALTSGVHTFPAVLQSSGLYSLSSVVT | SLQPEDFATYYCQQFNSYS |
| | | | | GSTSYAQRFQG | ASTLQSGVPS | VPSSSLGTQTYICNVNHKPSNTKVDKKVEPKSCDKTHT | LTFGGGTKLEIKRTVAAPS |
| | | | | RVTMTRDTSTS | RFSGSGSGTE | CPPCPAPELLGGPSVFLFPPKPKDTLMISRTPEVTCVV | VFIFPPSDEQLKSGTASVV |
| | | | | TVYMEVNSLRS | FTLTISSLQP | VDVSHEDPEVKFNWYVDGVEVHNAKTKPREEQYNSTYR | CLLNNFYPREAKVQWKVDN |
| | | | | EDTAVYYCARE | EDFATYYCQQ | VVSVLTVLHQDWLNGKEYKCKVSNKALPAPIEKTISKA | ALQSGNSQESVTEQDSKDS |
| | | | | RGYSYGSFDYW | FNSYSLTFGG | KGQPREPQVYTLPPSREEMTKNQVSLTCLVKGFYPSDI | TYSLSSTLTLSKADYEKHK |
| | | | | GQGTLVTVSS | GTKLEIK | AVEWESNGQPENNYKTTPPVLDSDGSFFLYSKLTVDKS | VYACEVTHQGLSSPVTKSF |
| | | | | | | RWQQGNVFSCSVMHEALHNHYTQKSLSLSPGK | NRGEC |
| | | | | 2649 | 2650 | 2651 | 2652 |
| 79 | VG9B208 | IgG1 | Lambda | QVQLQESGPGL | QSVLTQPPSV | QVQLQESGPGLVKPSETLSLTCTVSGGSISGYYWSWIR | QSVLTQPPSVSAAPGQKVT |
| | | | | VKPSETLSLTC | SAAPGQKVTI | QPPGKGLELIGYIFYSGSINYNPSLKNRVTISLDTSKN | ISCSGSTSNIGNNDVSWYQ |
| | | | | TVSGGSISGYY | SCSGSTSNIG | QFSLKLTSVTAADTAVYYCARVGKWELRSSFDIWGQGT | QLPGTAPKLLIYDNNKRPS |
| | | | | WSWIRQPPGKG | NNDVSWYQQL | MVTVSSASTKGPSVFPLAPSSKSTSGGTAALGCLVKDY | GIPDRFSGSKSGTSATLGI |
| | | | | LELIGYIFYSG | PGTAPKLLIY | FPEPVTVSWNSGALTSGVHTFPAVLQSSGLYSLSSVVT | TGLQTGDEADYYCGTWDSS |
| | | | | SINYNPSLKNR | DNNKRPSGIP | VPSSSLGTQTYICNVNHKPSNTKVDKKVEPKSCDKTHT | LSVWVFGGGTKLTVLGQPK |
| | | | | VTISLDTSKNQ | DRFSGSKSGT | CPPCPAPELLGGPSVFLFPPKPKDTLMISRTPEVTCVV | AAPSVTLFPPSSEELQANK |
| | | | | FSLKLTSVTAA | SATLGITGLQ | VDVSHEDPEVKFNWYVDGVEVHNAKTKPREEQYNSTYR | ATLVCLISDFYPGAVTVAW |
| | | | | DTAVYYCARVG | TGDEADYYCG | VVSVLTVLHQDWLNGKEYKCKVSNKALPAPIEKTISKA | KADSSPVKAGVETTTPSKQ |
| | | | | KWELRSSFDIW | TWDSSLSVWV | KGQPREPQVYTLPPSREEMTKNQVSLTCLVKGFYPSDI | SNNKYAASSYLSLTPEQWK |
| | | | | GQGTMVTVSS | FGGGTKLTVL | AVEWESNGQPENNYKTTPPVLDSDGSFFLYSKLTVDKS | SHRSYSCQVTHEGSTVEKT |
| | | | | | | RWQQGNVFSCSVMHEALHNHYTQKSLSLSPGK | VAPTECS |
| | | | | 2683 | 2684 | 2685 | 2686 |
| 80 | VG9B372 | IgG1 | Kappa | QVQLQESGPGL | EIVMTQSPAT | QVQLQESGPGLVKPSQTLSLTCTVSGGSISNGGFYWSW | EIVMTQSPATLSLSPGEGA |
| | | | | VKPSQTLSLTC | LSLSPGEGAT | IRQHPGKGLEWLGYINYSGSTYYNPSLESRGTISLDTS | TLSCRASQSVSSYLAWYQQ |
| | | | | TVSGGSISNGG | LSCRASQSVS | KNQFSLKLRSVTAADTAVYYCARDRNYEWNFDLWGRGT | KPGQAPRLLVYDASNRATG |
| | | | | FYWSWIRQHPG | SYLAWYQQKP | LVTVSSASTKGPSVFPLAPSSKSTSGGTAALGCLVKDY | IPARFSGSGSGTAFTLTIT |
| | | | | KGLEWLGYINY | GQAPRLLVYD | FPEPVTVSWNSGALTSGVHTFPAVLQSSGLYSLSSVVT | SLEPEDFVVYYCQQRSNWP |
| | | | | SGSTYYNPSLE | ASNRATGIPA | VPSSSLGTQTYICNVNHKPSNTKVDKKVEPKSCDKTHT | LTFGGGTKLEIKRTVAAPS |
| | | | | SRGTISLDTSK | RFSGSGSGTA | CPPCPAPELLGGPSVFLFPPKPKDTLMISRTPEVTCVV | VFIFPPSDEQLKSGTASVV |
| | | | | NQFSLKLRSVT | FTLTITSLEP | VDVSHEDPEVKFNWYVDGVEVHNAKTKPREEQYNSTYR | CLLNNFYPREAKVQWKVDN |
| | | | | AADTAVYYCAR | EDFVVYYCQQ | VVSVLTVLHQDWLNGKEYKCKVSNKALPAPIEKTISKA | ALQSGNSQESVTEQDSKDS |
| | | | | DRNYEWNFDLW | RSNWPLTFGG | KGQPREPQVYTLPPSREEMTKNQVSLTCLVKGFYPSDI | TYSLSSTLTLSKADYEKHK |
| | | | | GRGTLVTVSS | GTKLEIK | AVEWESNGQPENNYKTTPPVLDSDGSFFLYSKLTVDKS | VYACEVTHQGLSSPVTKSF |
| | | | | | | RWQQGNVFSCSVMHEALHNHYTQKSLSLSPGK | NRGEC |
| | | | | 2717 | 2718 | 2719 | 2720 |
| 81 | VG9B186 | IgG1 | Lambda | QVTLRESGPVL | QSVLTQPPSA | QVTLRESGPVLVKPTETLTLTCTVSGFSLTNIRMSVSW | QSVLTQPPSASGTPGQRVT |
| | | | | VKPTETLTLTC | SGTPGQRVTI | IRQPPGEALEWLAHIFSNDEKSYNSSLKSRLTISRDTS | ISCSGSTSNIGSNTVNWYQ |
| | | | | TVSGFSLTNIR | SCSGSTSNIG | KSQVVLTLTNVDPVDTATYYCARMRLPYGMDVWGQGTM | QLPGTAPKLLIYSNNQRPS |
| | | | | MSVSWIRQPPG | SNTVNWYQQL | VTVSSASTKGPSVFPLAPSSKSTSGGTAALGCLVKDYF | GVPDRFSGSKSGTSASLAI |
| | | | | EALEWLAHIFS | PGTAPKLLIY | PEPVTVSWNSGALTSGVHTFPAVLQSSGLYSLSSVVTV | SGLQSEDEADFYCAAWDDS |
| | | | | NDEKSYNSSLK | SNNQRPSGVP | PSSSLGTQTYICNVNHKPSNTKVDKKVEPKSCDKTHTC | LNGPVFGGGTKVTVLGQPK |
| | | | | SRLTISRDTSK | DRFSGSKSGT | PPCPAPELLGGPSVFLFPPKPKDTLMISRTPEVTCVVV | AAPSVTLFPPSSEELQANK |
| | | | | SQVVLTLTNVD | SASLAISGLQ | DVSHEDPEVKFNWYVDGVEVHNAKTKPREEQYNSTYRV | ATLVCLISDFYPGAVTVAW |
| | | | | PVDTATYYCAR | SEDEADFYCA | VSVLTVLHQDWLNGKEYKCKVSNKALPAPIEKTISKAK | KADSSPVKAGVETTTPSKQ |
| | | | | MRLPYGMDVWG | AWDDSLNGPV | GQPREPQVYTLPPSREEMTKNQVSLTCLVKGFYPSDIA | SNNKYAASSYLSLTPEQWK |
| | | | | QGTMVTVSS | FGGGTKVTVL | VEWESNGQPENNYKTTPPVLDSDGSFFLYSKLTVDKSR | SHRSYSCQVTHEGSTVEKT |
| | | | | | | WQQGNVFSCSVMHEALHNHYTQKSLSLSPGK | VAPTECS |
| | | | | 2751 | 2752 | 2753 | 2754 |
| 82 | VG9B177 | IgG1 | Lambda | QVQLQESGPGL | QSALTQPASV | QVQLQESGPGLVKPSETLSLTCTVSGGSINNYFWSWIR | QSALTQPASVSGSPGQSIT |
| | | | | VKPSETLSLTC | SGSPGQSITI | QPPGKGLEWIGYIFYSGSTNYNPSLKSRVTISIDTSKN | ISCTGTSSDVADYNYVSWY |
| | | | | TVSGGSINNYF | SCTGTSSDVA | QFSLKVNSVTAADTAVYYCARVGKWELRTAFDIWGQGT | QQHPGKAPKLMIYEVSNRP |
| | | | | WSWIRQPPGKG | DYNYVSWYQQ | MVTVSSASTKGPSVFPLAPSSKSTSGGTAALGCLVKDY | SGVSNRFSGSKSGNTASLT |
| | | | | LEWIGYIFYSG | HPGKAPKLMI | FPEPVTVSWNSGALTSGVHTFPAVLQSSGLYSLSSVVT | ISGLQAEDEADYYCCSYTS |
| | | | | STNYNPSLKSR | YEVSNRPSGV | VPSSSLGTQTYICNVNHKPSNTKVDKKVEPKSCDKTHT | SFTVVFGGGTKVTVLGQPK |
| | | | | VTISIDTSKNQ | SNRFSGSKSG | CPPCPAPELLGGPSVFLFPPKPKDTLMISRTPEVTCVV | AAPSVTLFPPSSEELQANK |
| | | | | FSLKVNSVTAA | NTASLTISGL | VDVSHEDPEVKFNWYVDGVEVHNAKTKPREEQYNSTYR | ATLVCLISDFYPGAVTVAW |
| | | | | DTAVYYCARVG | QAEDEADYYC | VVSVLTVLHQDWLNGKEYKCKVSNKALPAPIEKTISKA | KADSSPVKAGVETTTPSKQ |
| | | | | KWELRTAFDIW | CSYTSSFTVV | KGQPREPQVYTLPPSREEMTKNQVSLTCLVKGFYPSDI | SNNKYAASSYLSLTPEQWK |
| | | | | GQGTMVTVSS | FGGGTKVTVL | AVEWESNGQPENNYKTTPPVLDSDGSFFLYSKLTVDKS | SHRSYSCQVTHEGSTVEKT |
| | | | | | | RWQQGNVFSCSVMHEALHNHYTQKSLSLSPGK | VAPTECS |
| | | | | 2785 | 2786 | 2787 | 2788 |
| 83 | VG9B114 | IgG1 | Kappa | EVQLVESGGDL | DIVMTQSPSF | EVQLVESGGDLVQPGGSLRLSCAASGFTFSRYDMHWVR | DIVMTQSPSFLSASVGDRV |
| | | | | VQPGGSLRLSC | LSASVGDRVT | QATGKGLEWVSAIGSAGDTYYPGSVKGRFTISRENAKN | TITCRASQGIHSYLAWYQQ |
| | | | | AASGFTFSRYD | ITCRASQGIH | SLYLQMNSLRAGDTAVYYCARGKWELRDAFDIWGQGTM | KPGKAPKLLIYVASTLQSG |
| | | | | MHWVRQATGKG | SYLAWYQQKP | VTVSSASTKGPSVFPLAPSSKSTSGGTAALGCLVKDYF | VPSRFSGSRSGTEFTLTIS |
| | | | | LEWVSAIGSAG | GKAPKLLIYV | PEPVTVSWNSGALTSGVHTFPAVLQSSGLYSLSSVVTV | SLQPEDFATYYCQQLNSYP |
| | | | | DTYYPGSVKGR | ASTLQSGVPS | PSSSLGTQTYICNVNHKPSNTKVDKKVEPKSCDKTHTC | YTFGQGTKLEIKRTVAAPS |
| | | | | FTISRENAKNS | RFSGSRSGTE | PPCPAPELLGGPSVFLFPPKPKDTLMISRTPEVTCVVV | VFIFPPSDEQLKSGTASVV |
| | | | | LYLQMNSLRAG | FTLTISSLQP | DVSHEDPEVKFNWYVDGVEVHNAKTKPREEQYNSTYRV | CLLNNFYPREAKVQWKVDN |
| | | | | DTAVYYCARGK | EDFATYYCQQ | VSVLTVLHQDWLNGKEYKCKVSNKALPAPIEKTISKAK | ALQSGNSQESVTEQDSKDS |
| | | | | WELRDAFDIWG | LNSYPYTFGQ | GQPREPQVYTLPPSREEMTKNQVSLTCLVKGFYPSDIA | TYSLSSTLTLSKADYEKHK |
| | | | | QGTMVTVSS | GTKLEIK | VEWESNGQPENNYKTTPPVLDSDGSFFLYSKLTVDKSR | VYACEVTHQGLSSPVTKSF |
| | | | | | | WQQGNVFSCSVMHEALHNHYTQKSLSLSPGK | NRGEC |
| | | | | 2819 | 2820 | 2821 | 2822 |
| 84 | VG9B147 | IgG1 | Lambda | QVQLQESGPGL | SSELTQDPAV | QVQLQESGPGLVNPSETLSLTCTVSGGSISGYFWNWIR | SSELTQDPAVSVALGQTVR |
| | | | | VNPSETLSLTC | SVALGQTVRI | QPPGKGLEWIGYIFYSGSTNYNPSLKSRVTISVDTSKN | ITCQGDSLRSYYATWYQQK |
| | | | | TVSGGSISGYF | TCQGDSLRSY | QFSLKLSSVTAADTAIYYCAREGKWELRSTFDIWGQGT | PGQAPILVIYGENNRPSGI |
| | | | | WNWIRQPPGKG | YATWYQQKPG | MVTVSSASTKGPSVFPLAPSSKSTSGGTAALGCLVKDY | PDRFSGSRSGNTASLTITG |
| | | | | LEWIGYIFYSG | QAPILVIYGE | FPEPVTVSWNSGALTSGVHTFPAVLQSSGLYSLSSVVT | AQAEDEADYYCNSRDTGDH |
| | | | | STNYNPSLKSR | NNRPSGIPDR | VPSSSLGTQTYICNVNHKPSNTKVDKKVEPKSCDKTHT | HLVFGGGTKLTVLGQPKAA |
| | | | | VTISVDTSKNQ | FSGSRSGNTA | CPPCPAPELLGGPSVFLFPPKPKDTLMISRTPEVTCVV | PSVTLFPPSSEELQANKAT |
| | | | | FSLKLSSVTAA | SLTITGAQAE | VDVSHEDPEVKFNWYVDGVEVHNAKTKPREEQYNSTYR | LVCLISDFYPGAVTVAWKA |
| | | | | DTAIYYCAREG | DEADYYCNSR | VVSVLTVLHQDWLNGKEYKCKVSNKALPAPIEKTISKA | DSSPVKAGVETTTPSKQSN |
| | | | | KWELRSTFDIW | DTGDHHLVFG | KGQPREPQVYTLPPSREEMTKNQVSLTCLVKGFYPSDI | NKYAASSYLSLTPEQWKSH |
| | | | | GQGTMVTVSS | GGTKLTVL | AVEWESNGQPENNYKTTPPVLDSDGSFFLYSKLTVDKS | RSYSCQVTHEGSTVEKTVA |
| | | | | | | RWQQGNVFSCSVMHEALHNHYTQKSLSLSPGK | PTECS |
| | | | | 2853 | 2854 | 2855 | 2856 |
| 85 | VG9B65 | IgG1 | Kappa | QVQLVQSGAEV | DIVMTQTPLS | QVQLVQSGAEVKKPGSSVKVSCKASGGTFNIYAINWVR | DIVMTQTPLSSPVTLGQPA |
| | | | | KKPGSSVKVSC | SPVTLGQPAS | QAPGQGLEWMGGIIPFFGTANYAQKFQDRVTITADKST | SISCRSSQSLVHSDGNTYL |
| | | | | KASGGTFNIYA | ISCRSSQSLV | NTAYMELSSLRSEDTAVFYCARGGDSGYDWGFDYWGQG | SWLQQRPGQPPRLLIYQIS |
| | | | | INWVRQAPGQG | HSDGNTYLSW | TLVTVSSASTKGPSVFPLAPSSKSTSGGTAALGCLVKD | NRFSGVPDRFSGSGAGTDF |
| | | | | LEWMGGIIPFF | LQQRPGQPPR | YFPEPVTVSWNSGALTSGVHTFPAVLQSSGLYSLSSVV | TLNISRVEADDVGVYYCMQ |
| | | | | GTANYAQKFQD | LLIYQISNRF | TVPSSSLGTQTYICNVNHKPSNTKVDKKVEPKSCDKTH | ATQFPLTFGGGTKVEIKRT |
| | | | | RVTITADKSTN | SGVPDRFSGS | TCPPCPAPELLGGPSVFLFPPKPKDTLMISRTPEVTCV | VAAPSVFIFPPSDEQLKSG |
| | | | | TAYMELSSLRS | GAGTDFTLNI | VVDVSHEDPEVKFNWYVDGVEVHNAKTKPREEQYNSTY | TASVVCLLNNFYPREAKVQ |
| | | | | EDTAVFYCARG | SRVEADDVGV | RVVSVLTVLHQDWLNGKEYKCKVSNKALPAPIEKTISK | WKVDNALQSGNSQESVTEQ |
| | | | | GDSGYDWGFDY | YYCMQATQFP | AKGQPREPQVYTLPPSREEMTKNQVSLTCLVKGFYPSD | DSKDSTYSLSSTLTLSKAD |
| | | | | WGQGTLVTVSS | LTFGGGTKVE | IAVEWESNGQPENNYKTTPPVLDSDGSFFLYSKLTVDK | YEKHKVYACEVTHQGLSSP |
| | | | | | IK | SRWQQGNVFSCSVMHEALHNHYTQKSLSLSPGK | VTKSFNRGEC |
| | | | | 2887 | 2888 | 2889 | 2890 |
| 86 | VG9B81 | IgG1 | Kappa | QVQLQESGPGL | DIQMTQSPSF | QVQLQESGPGLVKPSETLSLTCSVSGGSINTYYWSWFR | DIQMTQSPSFLSASVRDRV |
| | | | | VKPSETLSLTC | LSASVRDRVN | QPAGKGLELIGRIYTSDNTNYNPSLKSRVTMSVDTSKN | NITCRASQGISSYLAWYQQ |
| | | | | SVSGGSINTYY | ITCRASQGIS | QFSLKLSSVTAADTAVYYCARYNWNYWYFDLWGRGTLV | KPGKAPKLLIYTASTLQSG |
| | | | | WSWFRQPAGKG | SYLAWYQQKP | TVSSASTKGPSVFPLAPSSKSTSGGTAALGCLVKDYFP | VPSRFSGSGSGTEFTLTIS |
| | | | | LELIGRIYTSD | GKAPKLLIYT | EPVTVSWNSGALTSGVHTFPAVLQSSGLYSLSSVVTVP | SLQPEDFATYYCQHLNSYP |
| | | | | NTNYNPSLKSR | ASTLQSGVPS | SSSLGTQTYICNVNHKPSNTKVDKKVEPKSCDKTHTCP | YTFGQGTKVEIKRTVAAPS |
| | | | | VTMSVDTSKNQ | RFSGSGSGTE | PCPAPELLGGPSVFLFPPKPKDTLMISRTPEVTCVVVD | VFIFPPSDEQLKSGTASVV |
| | | | | FSLKLSSVTAA | FTLTISSLQP | VSHEDPEVKFNWYVDGVEVHNAKTKPREEQYNSTYRVV | CLLNNFYPREAKVQWKVDN |
| | | | | DTAVYYCARYN | EDFATYYCQH | SVLTVLHQDWLNGKEYKCKVSNKALPAPIEKTISKAKG | ALQSGNSQESVTEQDSKDS |
| | | | | WNYWYFDLWGR | LNSYPYTFGQ | QPREPQVYTLPPSREEMTKNQVSLTCLVKGFYPSDIAV | TYSLSSTLTLSKADYEKHK |
| | | | | GTLVTVSS | GTKVEIK | EWESNGQPENNYKTTPPVLDSDGSFFLYSKLTVDKSRW | VYACEVTHQGLSSPVTKSF |
| | | | | | | QQGNVFSCSVMHEALHNHYTQKSLSLSPGK | NRGEC |
| | | | | 2921 | 2922 | 2923 | 2924 |
| 87 | VG9B203 | IgG1 | Lambda | QVQLVQSGPGL | QSVLTQPPSV | QVQLVQSGPGLVKPSETLSLTCTVSGDSIGHYYWNWIR | QSVLTQPPSVSAAPGQKVT |
| | | | | VKPSETLSLTC | SAAPGQKVTI | QPAGKGLEWIGRIYTSGSTNYNPSLKSRVTMSVDTSKN | ISCSGSSSNIGNNYVSWYQ |
| | | | | TVSGDSIGHYY | SCSGSSSNIG | QFSLKLSSVTAADTAVYYCARSGGNFYWYFDLWGRGTL | QVPGTAPKLLIYDNNKRPS |
| | | | | WNWIRQPAGKG | NNYVSWYQQV | VTVSSASTKGPSVFPLAPSSKSTSGGTAALGCLVKDYF | GIPDRISGSKSGTSATLGI |
| | | | | LEWIGRIYTSG | PGTAPKLLIY | PEPVTVSWNSGALTSGVHTFPAVLQSSGLYSLSSVVTV | TGLQTGDEADYYCGTWDSS |
| | | | | STNYNPSLKSR | DNNKRPSGIP | PSSSLGTQTYICNVNHKPSNTKVDKKVEPKSCDKTHTC | LSAGVFGGGTKVTVLGQPK |
| | | | | VTMSVDTSKNQ | DRISGSKSGT | PPCPAPELLGGPSVFLFPPKPKDTLMISRTPEVTCVVV | AAPSVTLFPPSSEELQANK |
| | | | | FSLKLSSVTAA | SATLGITGLQ | DVSHEDPEVKFNWYVDGVEVHNAKTKPREEQYNSTYRV | ATLVCLISDFYPGAVTVAW |
| | | | | DTAVYYCARSG | TGDEADYYCG | VSVLTVLHQDWLNGKEYKCKVSNKALPAPIEKTISKAK | KADSSPVKAGVETTTPSKQ |
| | | | | GNFYWYFDLWG | TWDSSLSAGV | GQPREPQVYTLPPSREEMTKNQVSLTCLVKGFYPSDIA | SNNKYAASSYLSLTPEQWK |
| | | | | RGTLVTVSS | FGGGTKVTVL | VEWESNGQPENNYKTTPPVLDSDGSFFLYSKLTVDKSR | SHRSYSCQVTHEGSTVEKT |
| | | | | | | WQQGNVFSCSVMHEALHNHYTQKSLSLSPGK | VAPTECS |
| | | | | 2955 | 2956 | 2957 | 2958 |
| 88 | VG9B380 | IgG1 | Lambda | QVQLQESGPGL | QSALTQPASV | QVQLQESGPGLVKPSETLSLTCTVSGGSISNYYWSWIR | QSALTQPASVSGSPGQSIT |
| | | | | VKPSETLSLTC | SGSPGQSITI | QPAGKGLEWIGRIYPSGITSYDPSLKSRVTMSLDTSKN | ISCTGTSSDVGGYNYVSWY |
| | | | | TVSGGSISNYY | SCTGTSSDVG | QFSLKLTSVTAADTAVYYCAGIMGTKGAFDIWGQGTMV | QQHPGKAPKLLIYEVSNRP |
| | | | | WSWIRQPAGKG | GYNYVSWYQQ | TVSSASTKGPSVFPLAPSSKSTSGGTAALGCLVKDYFP | SGVSNRFSGSKSGSTASLT |
| | | | | LEWIGRIYPSG | HPGKAPKLLI | EPVTVSWNSGALTSGVHTFPAVLQSSGLYSLSSVVTVP | ISGLQAEDEADYYCSSYTS |
| | | | | ITSYDPSLKSR | YEVSNRPSGV | SSSLGTQTYICNVNHKPSNTKVDKKVEPKSCDKTHTCP | TSVVFGGGTKLTVLGQPKA |
| | | | | VTMSLDTSKNQ | SNRFSGSKSG | PCPAPELLGGPSVFLFPPKPKDTLMISRTPEVTCVVVD | APSVTLFPPSSEELQANKA |
| | | | | FSLKLTSVTAA | STASLTISGL | VSHEDPEVKFNWYVDGVEVHNAKTKPREEQYNSTYRVV | TLVCLISDFYPGAVTVAWK |
| | | | | DTAVYYCAGIM | QAEDEADYYC | SVLTVLHQDWLNGKEYKCKVSNKALPAPIEKTISKAKG | ADSSPVKAGVETTTPSKQS |
| | | | | GTKGAFDIWGQ | SSYTSTSVVF | QPREPQVYTLPPSREEMTKNQVSLTCLVKGFYPSDIAV | NNKYAASSYLSLTPEQWKS |
| | | | | GTMVTVSS | GGGTKLTVL | EWESNGQPENNYKTTPPVLDSDGSFFLYSKLTVDKSRW | HRSYSCQVTHEGSTVEKTV |
| | | | | | | QQGNVFSCSVMHEALHNHYTQKSLSLSPGK | APTECS |
| | | | | 2989 | 2990 | 2991 | 2992 |
| 89 | VG9B103 | IgG1 | Kappa | EVQLVQSGAEV | ETTLTQSPLS | EVQLVQSGAEVKKPGSSVKVSCKTSGGTFSSYAISWVR | ETTLTQSPLSSPVTLGQPA |
| | | | | KKPGSSVKVSC | SPVTLGQPAS | QAPGQGLEWMGGIIPIFGTATYAQKFQDRVTITADKST | SISCRSSQGLVHSDGNTYL |
| | | | | KTSGGTFSSYA | ISCRSSQGLV | STAYMELSSLRSEDTAVFYCARGVGWGTDYYYGLDVWG | SWLQQRPGQSPRLLIYKIS |
| | | | | ISWVRQAPGQG | HSDGNTYLSW | QGTTVTVSSASTKGPSVFPLAPSSKSTSGGTAALGCLV | NRFSGVPDRFSGSGAGTDF |
| | | | | LEWMGGIIPIF | LQQRPGQSPR | KDYFPEPVTVSWNSGALTSGVHTFPAVLQSSGLYSLSS | TLKISRVEAEDVGVYYCMQ |
| | | | | GTATYAQKFQD | LLIYKISNRF | VVTVPSSSLGTQTYICNVNHKPSNTKVDKKVEPKSCDK | ATHHPLTFGGGTKVEIKRT |
| | | | | RVTITADKSTS | SGVPDRFSGS | THTCPPCPAPELLGGPSVFLFPPKPKDTLMISRTPEVT | VAAPSVFIFPPSDEQLKSG |
| | | | | TAYMELSSLRS | GAGTDFTLKI | CVVVDVSHEDPEVKFNWYVDGVEVHNAKTKPREEQYNS | TASVVCLLNNFYPREAKVQ |
| | | | | EDTAVFYCARG | SRVEAEDVGV | TYRVVSVLTVLHQDWLNGKEYKCKVSNKALPAPIEKTI | WKVDNALQSGNSQESVTEQ |
| | | | | VGWGTDYYYGL | YYCMQATHHP | SKAKGQPREPQVYTLPPSREEMTKNQVSLTCLVKGFYP | DSKDSTYSLSSTLTLSKAD |
| | | | | DVWGQGTTVTV | LTFGGGTKVE | SDIAVEWESNGQPENNYKTTPPVLDSDGSFFLYSKLTV | YEKHKVYACEVTHQGLSSP |
| | | | | SS | IK | DKSRWQQGNVFSCSVMHEALHNHYTQKSLSLSPGK | VTKSFNRGEC |
| | | | | 3023 | 3024 | 3025 | 3026 |
| 90 | VG9B462 | IgG1 | Lambda | QVQLQQSGPGL | QSVLTQPASV | QVQLQQSGPGLVKPSETLSLTCTVSGGSISNYYWSWIR | QSVLTQPASVSGSPGQSIT |
| | | | | VKPSETLSLTC | SGSPGQSITI | QPAGKGLGWIGRIYSSGITNYNPSLKSRVTMSVDTSKN | ISCTGTSSDVGGYNYVSWY |
| | | | | TVSGGSISNYY | SCTGTSSDVG | QLSLKLSSVTAADTAVYYCAGIVGVKGAFAIWGQGTMV | QQHPGKAPKLMIYEVSNRP |
| | | | | WSWIRQPAGKG | GYNYVSWYQQ | TVSSASTKGPSVFPLAPSSKSTSGGTAALGCLVKDYFP | SGVSNRFSGSKSGNTASLT |
| | | | | LGWIGRIYSSG | HPGKAPKLMI | EPVTVSWNSGALTSGVHTFPAVLQSSGLYSLSSVVTVP | ISGLQAEDEADYYCSSYTS |
| | | | | ITNYNPSLKSR | YEVSNRPSGV | SSSLGTQTYICNVNHKPSNTKVDKKVEPKSCDKTHTCP | TSVVFGGGTKLTVLGQPKA |
| | | | | VTMSVDTSKNQ | SNRFSGSKSG | PCPAPELLGGPSVFLFPPKPKDTLMISRTPEVTCVVVD | APSVTLFPPSSEELQANKA |
| | | | | LSLKLSSVTAA | NTASLTISGL | VSHEDPEVKFNWYVDGVEVHNAKTKPREEQYNSTYRVV | TLVCLISDFYPGAVTVAWK |
| | | | | DTAVYYCAGIV | QAEDEADYYC | SVLTVLHQDWLNGKEYKCKVSNKALPAPIEKTISKAKG | ADSSPVKAGVETTTPSKQS |
| | | | | GVKGAFAIWGQ | SSYTSTSVVF | QPREPQVYTLPPSREEMTKNQVSLTCLVKGFYPSDIAV | NNKYAASSYLSLTPEQWKS |
| | | | | GTMVTVSS | GGGTKLTVL | EWESNGQPENNYKTTPPVLDSDGSFFLYSKLTVDKSRW | HRSYSCQVTHEGSTVEKTV |
| | | | | | | QQGNVFSCSVMHEALHNHYTQKSLSLSPGK | APTECS |
| | | | | 3057 | 3058 | 3059 | 3060 |
| 91 | VG9B461 | IgG1 | Lambda | QVTLKESGPGL | QPVLTQSSSV | QVTLKESGPGLVKPSETLSLTCTVSGGSISNYYWSWIR | QPVLTQSSSVSGSPGQSIT |
| | | | | VKPSETLSLTC | SGSPGQSITI | QPAGKGLGWIGRIYSSGITNYNPSLKSRVTMSVDTSKN | ISCTGTSSDVGGYNYVSWY |
| | | | | TVSGGSISNYY | SCTGTSSDVG | QLSLKLSSVTAADTAVYYCAGIVGVKGAFAIWGQGTMV | QQHPGKAPKLMIYEVSNRP |
| | | | | WSWIRQPAGKG | GYNYVSWYQQ | TVSSASTKGPSVFPLAPSSKSTSGGTAALGCLVKDYFP | SGVSNRFSGSKSGNTASLT |
| | | | | LGWIGRIYSSG | HPGKAPKLMI | EPVTVSWNSGALTSGVHTFPAVLQSSGLYSLSSVVTVP | ISGLQAEDEADYYCSSYTS |
| | | | | ITNYNPSLKSR | YEVSNRPSGV | SSSLGTQTYICNVNHKPSNTKVDKKVEPKSCDKTHTCP | TSVVFGGGTKVTVLGQPKA |
| | | | | VTMSVDTSKNQ | SNRFSGSKSG | PCPAPELLGGPSVFLFPPKPKDTLMISRTPEVTCVVVD | APSVTLFPPSSEELQANKA |
| | | | | LSLKLSSVTAA | NTASLTISGL | VSHEDPEVKFNWYVDGVEVHNAKTKPREEQYNSTYRVV | TLVCLISDFYPGAVTVAWK |
| | | | | DTAVYYCAGIV | QAEDEADYYC | SVLTVLHQDWLNGKEYKCKVSNKALPAPIEKTISKAKG | ADSSPVKAGVETTTPSKQS |
| | | | | GVKGAFAIWGQ | SSYTSTSVVF | QPREPQVYTLPPSREEMTKNQVSLTCLVKGFYPSDIAV | NNKYAASSYLSLTPEQWKS |
| | | | | GTMVTVSS | GGGTKVTVL | EWESNGQPENNYKTTPPVLDSDGSFFLYSKLTVDKSRW | HRSYSCQVTHEGSTVEKTV |
| | | | | | | QQGNVFSCSVMHEALHNHYTQKSLSLSPGK | APTECS |
| | | | | 3091 | 3092 | 3093 | 3094 |
| 92 | VG9B106 | IgG1 | Kappa | EVQLVQSGAEV | DIVMTQSPDS | EVQLVQSGAEVKKPGASVKVSCKASGYTFTGYYLHWVR | DIVMTQSPDSLAVSLGERA |
| | | | | KKPGASVKVSC | LAVSLGERAT | QAPGQGLEWVGWINPSSGDTDYAQTFQGRVTMTRDTSI | TINCKSSQSVLYSSNNKNY |
| | | | | KASGYTFTGYY | INCKSSQSVL | STAYMELSRLRSDDTAVYYCANELGIGVFDYWGQGTLV | LGWYQQKPGQPPKLLIYWA |
| | | | | LHWVRQAPGQG | YSSNNKNYLG | TVSSASTKGPSVFPLAPSSKSTSGGTAALGCLVKDYFP | STRESGVPDRFSGSGSGTD |
| | | | | LEWVGWINPSS | WYQQKPGQPP | EPVTVSWNSGALTSGVHTFPAVLQSSGLYSLSSVVTVP | FTLTISSLQAEDVAVYFCQ |
| | | | | GDTDYAQTFQG | KLLIYWASTR | SSSLGTQTYICNVNHKPSNTKVDKKVEPKSCDKTHTCP | QYYSIPYTFGQGTKVDIKR |
| | | | | RVTMTRDTSIS | ESGVPDRFSG | PCPAPELLGGPSVFLFPPKPKDTLMISRTPEVTCVVVD | TVAAPSVFIFPPSDEQLKS |
| | | | | TAYMELSRLRS | SGSGTDFTLT | VSHEDPEVKFNWYVDGVEVHNAKTKPREEQYNSTYRVV | GTASVVCLLNNFYPREAKV |
| | | | | DDTAVYYCANE | ISSLQAEDVA | SVLTVLHQDWLNGKEYKCKVSNKALPAPIEKTISKAKG | QWKVDNALQSGNSQESVTE |
| | | | | LGIGVFDYWGQ | VYFCQQYYSI | QPREPQVYTLPPSREEMTKNQVSLTCLVKGFYPSDIAV | QDSKDSTYSLSSTLTLSKA |
| | | | | GTLVTVSS | PYTFGQGTKV | EWESNGQPENNYKTTPPVLDSDGSFFLYSKLTVDKSRW | DYEKHKVYACEVTHQGLSS |
| | | | | | DIK | QQGNVFSCSVMHEALHNHYTQKSLSLSPGK | PVTKSFNRGEC |
| | | | | 3125 | 3126 | 3127 | 3128 |
| 93 | VG9B115 | IgG1 | Kappa | QVTLRESGPTL | EIVLTQSPAT | QVTLRESGPTLVKPTQTLTLTCTFSGFSLSTYGVGVGW | EIVLTQSPATLSLSPGERA |
| | | | | VKPTQTLTLTC | LSLSPGERAT | IRQPPGKALEWLALIYWNDDKRYNPSLKSRLTITKDTS | TLSCRASQSVSSYLAWYQQ |
| | | | | TFSGFSLSTYG | LSCRASQSVS | KNQVVLTMTNMDPVGTATYYCSHESDWSYYFDYWGQGT | KPGLAPRLLIYDASNRATG |
| | | | | VGVGWIRQPPG | SYLAWYQQKP | MVTVSSASTKGPSVFPLAPSSKSTSGGTAALGCLVKDY | IPARFSGSGSGTDFTLTIS |
| | | | | KALEWLALIYW | GLAPRLLIYD | FPEPVTVSWNSGALTSGVHTFPAVLQSSGLYSLSSVVT | SLEPVDFAVYYCQQRSSWP |
| | | | | NDDKRYNPSLK | ASNRATGIPA | VPSSSLGTQTYICNVNHKPSNTKVDKKVEPKSCDKTHT | WTFGQGTKVDIKRTVAAPS |
| | | | | SRLTITKDTSK | RFSGSGSGTD | CPPCPAPELLGGPSVFLFPPKPKDTLMISRTPEVTCVV | VFIFPPSDEQLKSGTASVV |
| | | | | NQVVLTMTNMD | FTLTISSLEP | VDVSHEDPEVKFNWYVDGVEVHNAKTKPREEQYNSTYR | CLLNNFYPREAKVQWKVDN |
| | | | | PVGTATYYCSH | VDFAVYYCQQ | VVSVLTVLHQDWLNGKEYKCKVSNKALPAPIEKTISKA | ALQSGNSQESVTEQDSKDS |
| | | | | ESDWSYYFDYW | RSSWPWTFGQ | KGQPREPQVYTLPPSREEMTKNQVSLTCLVKGFYPSDI | TYSLSSTLTLSKADYEKHK |
| | | | | GQGTMVTVSS | GTKVDIK | AVEWESNGQPENNYKTTPPVLDSDGSFFLYSKLTVDKS | VYACEVTHQGLSSPVTKSF |
| | | | | | | RWQQGNVFSCSVMHEALHNHYTQKSLSLSPGK | NRGEC |
| | | | | 3159 | 3160 | 3161 | 3162 |
| 94 | VG9B27 | IgG1 | Kappa | EVQLVQSGAEV | DIVMTQTPLS | EVQLVQSGAEVKKPGSSVKVSCKASGGTFSSYVISWVR | DIVMTQTPLSSPVTLGQPA |
| | | | | KKPGSSVKVSC | SPVTLGQPAS | QAPGQGLEWMGGILPILSTANYAQKFQGRVTITADKST | SISCRSSQSLVHSDGNTYL |
| | | | | KASGGTFSSYV | ISCRSSQSLV | STAYMELSSLRSEDTAVYYCARAHDYYYGMDVWGQGTM | SWLQQRPGQPPRLLVYKIS |
| | | | | ISWVRQAPGQG | HSDGNTYLSW | VTVSSASTKGPSVFPLAPSSKSTSGGTAALGCLVKDYF | NRFSGVPDRFSGSGAGTDF |
| | | | | LEWMGGILPIL | LQQRPGQPPR | PEPVTVSWNSGALTSGVHTFPAVLQSSGLYSLSSVVTV | TLKISRVEAEDVGIYYCMQ |
| | | | | STANYAQKFQG | LLVYKISNRF | PSSSLGTQTYICNVNHKPSNTKVDKKVEPKSCDKTHTC | ATHHPLTFGGGTKLEIKRT |
| | | | | RVTITADKSTS | SGVPDRFSGS | PPCPAPELLGGPSVFLFPPKPKDTLMISRTPEVTCVVV | VAAPSVFIFPPSDEQLKSG |
| | | | | TAYMELSSLRS | GAGTDFTLKI | DVSHEDPEVKFNWYVDGVEVHNAKTKPREEQYNSTYRV | TASVVCLLNNFYPREAKVQ |
| | | | | EDTAVYYCARA | SRVEAEDVGI | VSVLTVLHQDWLNGKEYKCKVSNKALPAPIEKTISKAK | WKVDNALQSGNSQESVTEQ |
| | | | | HDYYYGMDVWG | YYCMQATHHP | GQPREPQVYTLPPSREEMTKNQVSLTCLVKGFYPSDIA | DSKDSTYSLSSTLTLSKAD |
| | | | | QGTMVTVSS | LTFGGGTKLE | VEWESNGQPENNYKTTPPVLDSDGSFFLYSKLTVDKSR | YEKHKVYACEVTHQGLSSP |
| | | | | | IK | WQQGNVFSCSVMHEALHNHYTQKSLSLSPGK | VTKSFNRGEC |
| | | | | 3193 | 3194 | 3195 | 3196 |
| 95 | VG9B458 | IgG1 | Lambda | QVQLVQSGPGL | QSVLTQPASV | QVQLVQSGPGLVKPSETLSLTCTVSGGSISNYYWSWIR | QSVLTQPASVSGSPGQSIT |
| | | | | VKPSETLSLTC | SGSPGQSITI | QPAGKGLGWIGRIYSSGITNYNPSLKSRVTMSVDTSKN | ISCTGTSSDVGGYNYVSWY |
| | | | | TVSGGSISNYY | SCTGTSSDVG | QLSLKLSSVTAADTAVYYCAGIVGVKGAFAIWGQGTMV | QQHPGKAPKLMIYEVSNRP |
| | | | | WSWIRQPAGKG | GYNYVSWYQQ | TVSSASTKGPSVFPLAPSSKSTSGGTAALGCLVKDYFP | SGVSNRFSGSKSGNTASLT |
| | | | | LGWIGRIYSSG | HPGKAPKLMI | EPVTVSWNSGALTSGVHTFPAVLQSSGLYSLSSVVTVP | ISGLQAEDEADYYCSSYTS |
| | | | | ITNYNPSLKSR | YEVSNRPSGV | SSSLGTQTYICNVNHKPSNTKVDKKVEPKSCDKTHTCP | TSVVFGGGTKLTVLGQPKA |
| | | | | VTMSVDTSKNQ | SNRFSGSKSG | PCPAPELLGGPSVFLFPPKPKDTLMISRTPEVTCVVVD | APSVTLFPPSSEELQANKA |
| | | | | LSLKLSSVTAA | NTASLTISGL | VSHEDPEVKFNWYVDGVEVHNAKTKPREEQYNSTYRVV | TLVCLISDFYPGAVTVAWK |
| | | | | DTAVYYCAGIV | QAEDEADYYC | SVLTVLHQDWLNGKEYKCKVSNKALPAPIEKTISKAKG | ADSSPVKAGVETTTPSKQS |
| | | | | GVKGAFAIWGQ | SSYTSTSVVF | QPREPQVYTLPPSREEMTKNQVSLTCLVKGFYPSDIAV | NNKYAASSYLSLTPEQWKS |
| | | | | GTMVTVSS | GGGTKLTVL | EWESNGQPENNYKTTPPVLDSDGSFFLYSKLTVDKSRW | HRSYSCQVTHEGSTVEKTV |
| | | | | | | QQGNVFSCSVMHEALHNHYTQKSLSLSPGK | APTECS |
| | | | | 3227 | 3228 | 3229 | 3230 |
| 96 | VG9B131 | IgG1 | Kappa | QVQLVQSGGTL | EIVMTQSPAT | QVQLVQSGGTLVQPGGSLRLSCAVSGFTFSSYDMNWVR | EIVMTQSPATLSLSPGERA |
| | | | | VQPGGSLRLSC | LSLSPGERAT | QAPGKGLEWVSYISSSSTAKYYADSVKGRFTISRDNAK | TLSCRASQSVSNYLAWYQQ |
| | | | | AVSGFTFSSYD | LSCRASQSVS | NSLYLQMNSLWDEDTAVYYCAREDIVVVTPILQHWGQG | KSGQAPRLLIYDASNRATG |
| | | | | MNWVRQAPGKG | NYLAWYQQKS | TLVTVSSASTKGPSVFPLAPSSKSTSGGTAALGCLVKD | IPARFSGSGSGTDFTLTIS |
| | | | | LEWVSYISSSS | GQAPRLLIYD | YFPEPVTVSWNSGALTSGVHTFPAVLQSSGLYSLSSVV | SLEPEDFAVYCCQQRSNWT |
| | | | | TAKYYADSVKG | ASNRATGIPA | TVPSSSLGTQTYICNVNHKPSNTKVDKKVEPKSCDKTH | FGQGTRLEIKRTVAAPSVF |
| | | | | RFTISRDNAKN | RFSGSGSGTD | TCPPCPAPELLGGPSVFLFPPKPKDTLMISRTPEVTCV | IFPPSDEQLKSGTASVVCL |
| | | | | SLYLQMNSLWD | FTLTISSLEP | VVDVSHEDPEVKFNWYVDGVEVHNAKTKPREEQYNSTY | LNNFYPREAKVQWKVDNAL |
| | | | | EDTAVYYCARE | EDFAVYCCQQ | RVVSVLTVLHQDWLNGKEYKCKVSNKALPAPIEKTISK | QSGNSQESVTEQDSKDSTY |
| | | | | DIVVVTPILQH | RSNWTFGQGT | AKGQPREPQVYTLPPSREEMTKNQVSLTCLVKGFYPSD | SLSSTLTLSKADYEKHKVY |
| | | | | WGQGTLVTVSS | RLEIK | IAVEWESNGQPENNYKTTPPVLDSDGSFFLYSKLTVDK | ACEVTHQGLSSPVTKSFNR |
| | | | | | | SRWQQGNVFSCSVMHEALHNHYTQKSLSLSPGK | GEC |
| | | | | 3261 | 3262 | 3263 | 3264 |
| 97 | VG9B163 | IgG1 | Lambda | QVQLVQSGGGL | QLVLTQPPSV | QVQLVQSGGGLVKPGASLKLSCAASGFTFSNHGMSWVR | QLVLTQPPSVSAAPGQKVT |
| | | | | VKPGASLKLSC | SAAPGQKVTI | QTSDKRLEWVASITRGGDTTYYPDNVKGRFTISRENAK | ISCSGNSSNIGHNYVSWYQ |
| | | | | AASGFTFSNHG | SCSGNSSNIG | NTLYLQMSSLKSDDTALYYCTRGPLTVGYAMDYWGQGT | QLPGTAPKLLIYDNNQRPS |
| | | | | MSWVRQTSDKR | HNYVSWYQQL | TVTVSSASTKGPSVFPLAPSSKSTSGGTAALGCLVKDY | GIPDRFSGSKSDTSATLGI |
| | | | | LEWVASITRGG | PGTAPKLLIY | FPEPVTVSWNSGALTSGVHTFPAVLQSSGLYSLSSVVT | TGLQTGDEADYYCGIWDSS |
| | | | | DTTYYPDNVKG | DNNQRPSGIP | VPSSSLGTQTYICNVNHKPSNTKVDKKVEPKSCDKTHT | LSIVVFGGGTKVTVLGQPK |
| | | | | RFTISRENAKN | DRFSGSKSDT | CPPCPAPELLGGPSVFLFPPKPKDTLMISRTPEVTCVV | AAPSVTLFPPSSEELQANK |
| | | | | TLYLQMSSLKS | SATLGITGLQ | VDVSHEDPEVKFNWYVDGVEVHNAKTKPREEQYNSTYR | ATLVCLISDFYPGAVTVAW |
| | | | | DDTALYYCTRG | TGDEADYYCG | VVSVLTVLHQDWLNGKEYKCKVSNKALPAPIEKTISKA | KADSSPVKAGVETTTPSKQ |
| | | | | PLTVGYAMDYW | IWDSSLSIVV | KGQPREPQVYTLPPSREEMTKNQVSLTCLVKGFYPSDI | SNNKYAASSYLSLTPEQWK |
| | | | | GQGTTVTVSS | FGGGTKVTVL | AVEWESNGQPENNYKTTPPVLDSDGSFFLYSKLTVDKS | SHRSYSCQVTHEGSTVEKT |
| | | | | | | RWQQGNVFSCSVMHEALHNHYTQKSLSLSPGK | VAPTECS |
| | | | | 3295 | 3296 | 3297 | 3298 |
| 98 | VG9B454 | IgG1 | Lambda | QVQLQESGPGL | QAVLTQPASV | QVQLQESGPGLVKPSETLSLTCTVSGGSISNYYWSWIR | QAVLTQPASVSGSPGQSIT |
| | | | | VKPSETLSLTC | SGSPGQSITI | QPAGKGLGWIGRIYSSGITNYNPSLKSRVTMSVDTSKN | ISCTGTSSDVGGYNYVSWY |
| | | | | TVSGGSISNYY | SCTGTSSDVG | QLSLKLSSVTAADTAVYYCAGIVGVKGAFAIWGQGTMV | QQHPGKAPKLMIYEVSNRP |
| | | | | WSWIRQPAGKG | GYNYVSWYQQ | TVSSASTKGPSVFPLAPSSKSTSGGTAALGCLVKDYFP | SGVSNRFSGSKSGNTASLT |
| | | | | LGWIGRIYSSG | HPGKAPKLMI | EPVTVSWNSGALTSGVHTFPAVLQSSGLYSLSSVVTVP | ISGLQAEDEADYYCSSYTS |
| | | | | ITNYNPSLKSR | YEVSNRPSGV | SSSLGTQTYICNVNHKPSNTKVDKKVEPKSCDKTHTCP | TSVVFGGGTKLTVLGQPKA |
| | | | | VTMSVDTSKNQ | SNRFSGSKSG | PCPAPELLGGPSVFLFPPKPKDTLMISRTPEVTCVVVD | APSVTLFPPSSEELQANKA |
| | | | | LSLKLSSVTAA | NTASLTISGL | VSHEDPEVKFNWYVDGVEVHNAKTKPREEQYNSTYRVV | TLVCLISDFYPGAVTVAWK |
| | | | | DTAVYYCAGIV | QAEDEADYYC | SVLTVLHQDWLNGKEYKCKVSNKALPAPIEKTISKAKG | ADSSPVKAGVETTTPSKQS |
| | | | | GVKGAFAIWGQ | SSYTSTSVVF | QPREPQVYTLPPSREEMTKNQVSLTCLVKGFYPSDIAV | NNKYAASSYLSLTPEQWKS |
| | | | | GTMVTVSS | GGGTKLTVL | EWESNGQPENNYKTTPPVLDSDGSFFLYSKLTVDKSRW | HRSYSCQVTHEGSTVEKTV |
| | | | | | | QQGNVFSCSVMHEALHNHYTQKSLSLSPGK | APTECS |
| | | | | 3329 | 3330 | 3331 | 3332 |
| 99 | VG9B439 | IgG1 | Lambda | QVQLQQSGPGL | QSALTQPASV | QVQLQQSGPGLVKPSETLSLTCTVSGGSISNYYWSWIR | QSALTQPASVSGSPGQSIT |
| | | | | VKPSETLSLTC | SGSPGQSITI | QPAGKGLGWIGRIYSSGITNYNPSLKSRVTMSVDTSKN | ISCTGTSSDVGGYNYVSWY |
| | | | | TVSGGSISNYY | SCTGTSSDVG | QLSLKLSSVTAADTAVYYCAGIVGVKGAFAIWGQGTMV | QQHPGKAPKLMIYEVSNRP |
| | | | | WSWIRQPAGKG | GYNYVSWYQQ | TVSSASTKGPSVFPLAPSSKSTSGGTAALGCLVKDYFP | SGVSNRFSGSKSGNTASLT |
| | | | | LGWIGRIYSSG | HPGKAPKLMI | EPVTVSWNSGALTSGVHTFPAVLQSSGLYSLSSVVTVP | ISGLQAEDEADYYCSSYTS |
| | | | | ITNYNPSLKSR | YEVSNRPSGV | SSSLGTQTYICNVNHKPSNTKVDKKVEPKSCDKTHTCP | TSVVFGGGTKLTVLGQPKA |
| | | | | VTMSVDTSKNQ | SNRFSGSKSG | PCPAPELLGGPSVFLFPPKPKDTLMISRTPEVTCVVVD | APSVTLFPPSSEELQANKA |
| | | | | LSLKLSSVTAA | NTASLTISGL | VSHEDPEVKFNWYVDGVEVHNAKTKPREEQYNSTYRVV | TLVCLISDFYPGAVTVAWK |
| | | | | DTAVYYCAGIV | QAEDEADYYC | SVLTVLHQDWLNGKEYKCKVSNKALPAPIEKTISKAKG | ADSSPVKAGVETTTPSKQS |
| | | | | GVKGAFAIWGQ | SSYTSTSVVF | QPREPQVYTLPPSREEMTKNQVSLTCLVKGFYPSDIAV | NNKYAASSYLSLTPEQWKS |
| | | | | GTMVTVSS | GGGTKLTVL | EWESNGQPENNYKTTPPVLDSDGSFFLYSKLTVDKSRW | HRSYSCQVTHEGSTVEKTV |
| | | | | | | QQGNVFSCSVMHEALHNHYTQKSLSLSPGK | APTECS |
| | | | | 3363 | 3364 | 3365 | 3366 |
| 100 | VG9B68 | IgG1 | Kappa | EVQLVESGAEV | EIVMTQSPLS | EVQLVESGAEVKKPGSSVKVSCKASGGTFSTYAISWVR | EIVMTQSPLSSPVTLGQPA |
| | | | | KKPGSSVKVSC | SPVTLGQPAS | QAPGQGLEWMGGIIPIFGTATYAQRFQDRVMITADKST | SISCRSSQSLVHSDGNTYL |
| | | | | KASGGTFSTYA | ISCRSSQSLV | TTAYMELSSLRSEDTAVFYCARGVGWGSDYYYGLDVWG | SWLQQRPGQSPRLLIYKIS |
| | | | | ISWVRQAPGQG | HSDGNTYLSW | QGTMVTVSSASTKGPSVFPLAPSSKSTSGGTAALGCLV | NRFSGVPDRFSGSGAGTDF |
| | | | | LEWMGGIIPIF | LQQRPGQSPR | KDYFPEPVTVSWNSGALTSGVHTFPAVLQSSGLYSLSS | TLRITRVEPEDVGVYYCIQ |
| | | | | GTATYAQRFQD | LLIYKISNRF | VVTVPSSSLGTQTYICNVNHKPSNTKVDKKVEPKSCDK | ATHHPLTFGGGTRLEIKRT |
| | | | | RVMITADKSTT | SGVPDRFSGS | THTCPPCPAPELLGGPSVFLFPPKPKDTLMISRTPEVT | VAAPSVFIFPPSDEQLKSG |
| | | | | TAYMELSSLRS | GAGTDFTLRI | CVVVDVSHEDPEVKFNWYVDGVEVHNAKTKPREEQYNS | TASVVCLLNNFYPREAKVQ |
| | | | | EDTAVFYCARG | TRVEPEDVGV | TYRVVSVLTVLHQDWLNGKEYKCKVSNKALPAPIEKTI | WKVDNALQSGNSQESVTEQ |
| | | | | VGWGSDYYYGL | YYCIQATHHP | SKAKGQPREPQVYTLPPSREEMTKNQVSLTCLVKGFYP | DSKDSTYSLSSTLTLSKAD |
| | | | | DVWGQGTMVTV | LTFGGGTRLE | SDIAVEWESNGQPENNYKTTPPVLDSDGSFFLYSKLTV | YEKHKVYACEVTHQGLSSP |
| | | | | SS | IK | DKSRWQQGNVFSCSVMHEALHNHYTQKSLSLSPGK | VTKSFNRGEC |
| | | | | 3397 | 3398 | 3399 | 3400 |
| 101 | VG9B449 | IgG1 | Lambda | QVQLQESGPGL | QAVLTQPASV | QVQLQESGPGLVKPSETLSLTCTVSGGSISNYYWSWIR | QAVLTQPASVSGSPGQSIT |
| | | | | VKPSETLSLTC | SGSPGQSITI | QPAGKGLGWIGRIYSSGITNYNPSLKSRVTMSVDTSKN | ISCTGTSSDVGGYNYVSWY |
| | | | | TVSGGSISNYY | SCTGTSSDVG | QLSLKLSSVTAADTAVYYCAGIVGVKGAFAIWGQGTMV | QQHPGKAPKLMIYEVSNRP |
| | | | | WSWIRQPAGKG | GYNYVSWYQQ | TVSSASTKGPSVFPLAPSSKSTSGGTAALGCLVKDYFP | SGVSNRFSGSKSGNTASLT |
| | | | | LGWIGRIYSSG | HPGKAPKLMI | EPVTVSWNSGALTSGVHTFPAVLQSSGLYSLSSVVTVP | ISGLQAEDEADYYCSSYTS |
| | | | | ITNYNPSLKSR | YEVSNRPSGV | SSSLGTQTYICNVNHKPSNTKVDKKVEPKSCDKTHTCP | TSVVFGGGTKVTVLGQPKA |
| | | | | VTMSVDTSKNQ | SNRFSGSKSG | PCPAPELLGGPSVFLFPPKPKDTLMISRTPEVTCVVVD | APSVTLFPPSSEELQANKA |
| | | | | LSLKLSSVTAA | NTASLTISGL | VSHEDPEVKFNWYVDGVEVHNAKTKPREEQYNSTYRVV | TLVCLISDFYPGAVTVAWK |
| | | | | DTAVYYCAGIV | QAEDEADYYC | SVLTVLHQDWLNGKEYKCKVSNKALPAPIEKTISKAKG | ADSSPVKAGVETTTPSKQS |
| | | | | GVKGAFAIWGQ | SSYTSTSVVF | QPREPQVYTLPPSREEMTKNQVSLTCLVKGFYPSDIAV | NNKYAASSYLSLTPEQWKS |
| | | | | GTMVTVSS | GGGTKVTVL | EWESNGQPENNYKTTPPVLDSDGSFFLYSKLTVDKSRW | HRSYSCQVTHEGSTVEKTV |
| | | | | | | QQGNVFSCSVMHEALHNHYTQKSLSLSPGK | APTECS |
| | | | | 3431 | 3432 | 3433 | 3434 |
| 102 | VG9B204 | IgG1 | Lambda | QVQLQESGPGL | SSELTQPPSV | QVQLQESGPGLVKPSETLSLTCTVSYGSFSSFYWSWIR | SSELTQPPSVSVSPGQTAS |
| | | | | VKPSETLSLTC | SVSPGQTASI | QPAGKGLEWIGRIYTSGGTIYNPSLKSRVTMSVDTSKN | ITCSGDKLGDKYACWYQQK |
| | | | | TVSYGSFSSFY | TCSGDKLGDK | QFSLKLSSVTAADTAVYYCARWLRAFDYWGQGTLVTVS | PGQSPVLVIYQDSKRPSGI |
| | | | | WSWIRQPAGKG | YACWYQQKPG | SASTKGPSVFPLAPSSKSTSGGTAALGCLVKDYFPEPV | PERFSGSNSGNTATLTISG |
| | | | | LEWIGRIYTSG | QSPVLVIYQD | TVSWNSGALTSGVHTFPAVLQSSGLYSLSSVVTVPSSS | TQAMDEADYYCQAWDSSTV |
| | | | | GTIYNPSLKSR | SKRPSGIPER | LGTQTYICNVNHKPSNTKVDKKVEPKSCDKTHTCPPCP | VFGGGTKLTVLGQPKAAPS |
| | | | | VTMSVDTSKNQ | FSGSNSGNTA | APELLGGPSVFLFPPKPKDTLMISRTPEVTCVVVDVSH | VTLFPPSSEELQANKATLV |
| | | | | FSLKLSSVTAA | TLTISGTQAM | EDPEVKFNWYVDGVEVHNAKTKPREEQYNSTYRVVSVL | CLISDFYPGAVTVAWKADS |
| | | | | DTAVYYCARWL | DEADYYCQAW | TVLHQDWLNGKEYKCKVSNKALPAPIEKTISKAKGQPR | SPVKAGVETTTPSKQSNNK |
| | | | | RAFDYWGQGTL | DSSTVVFGGG | EPQVYTLPPSREEMTKNQVSLTCLVKGFYPSDIAVEWE | YAASSYLSLTPEQWKSHRS |
| | | | | VTVSS | TKLTVL | SNGQPENNYKTTPPVLDSDGSFFLYSKLTVDKSRWQQG | YSCQVTHEGSTVEKTVAPT |
| | | | | | | NVFSCSVMHEALHNHYTQKSLSLSPGK | ECS |
| | | | | 3465 | 3466 | 3467 | 3468 |
| 103 | VG9B459 | IgG1 | Lambda | QVQLQESGPGL | QPVLTQPASV | QVQLQESGPGLVKPSETLSLTCTVSGGSISNYYWSWIR | QPVLTQPASVSGSPGQSIT |
| | | | | VKPSETLSLTC | SGSPGQSITI | QPAGKGLGWIGRIYSSGITNYNPSLKSRVTMSVDTSKN | ISCTGTSSDVGGYNYVSWY |
| | | | | TVSGGSISNYY | SCTGTSSDVG | QLSLKLSSVTAADTAVYYCAGIVGVKGAFAIWGQGTMV | QQHPGKAPKLMIYEVSNRP |
| | | | | WSWIRQPAGKG | GYNYVSWYQQ | TVSSASTKGPSVFPLAPSSKSTSGGTAALGCLVKDYFP | SGVSNRFSGSKSGNTASLT |
| | | | | LGWIGRIYSSG | HPGKAPKLMI | EPVTVSWNSGALTSGVHTFPAVLQSSGLYSLSSVVTVP | ISGLQAEDEADYYCSSYTS |
| | | | | ITNYNPSLKSR | YEVSNRPSGV | SSSLGTQTYICNVNHKPSNTKVDKKVEPKSCDKTHTCP | TSVVFGGGTKLTVLGQPKA |
| | | | | VTMSVDTSKNQ | SNRFSGSKSG | PCPAPELLGGPSVFLFPPKPKDTLMISRTPEVTCVVVD | APSVTLFPPSSEELQANKA |
| | | | | LSLKLSSVTAA | NTASLTISGL | VSHEDPEVKFNWYVDGVEVHNAKTKPREEQYNSTYRVV | TLVCLISDFYPGAVTVAWK |
| | | | | DTAVYYCAGIV | QAEDEADYYC | SVLTVLHQDWLNGKEYKCKVSNKALPAPIEKTISKAKG | ADSSPVKAGVETTTPSKQS |
| | | | | GVKGAFAIWGQ | SSYTSTSVVF | QPREPQVYTLPPSREEMTKNQVSLTCLVKGFYPSDIAV | NNKYAASSYLSLTPEQWKS |
| | | | | GTMVTVSS | GGGTKLTVL | EWESNGQPENNYKTTPPVLDSDGSFFLYSKLTVDKSRW | HRSYSCQVTHEGSTVEKTV |
| | | | | | | QQGNVFSCSVMHEALHNHYTQKSLSLSPGK | APTECS |
| | | | | 3499 | 3500 | 3501 | 3502 |
| 104 | VG9B157 | IgG1 | Lambda | EVQLLESGGGL | SSELTQDPAV | EVQLLESGGGLVKPGASLKLSCAASGFTFSNHGMSWVR | SSELTQDPAVSVALGQTVR |
| | | | | VKPGASLKLSC | SVALGQTVRI | QTSDKRLEWVASITRGGDTTYYPDNVKGRFTISRENAK | ITCQGDSLRSYYATWYQQK |
| | | | | AASGFTFSNHG | TCQGDSLRSY | NTLYLQMSSLKSDDTALYYCTRGPLTVGYAMDYWGQGT | PGQAPILVIYGENNRPSGI |
| | | | | MSWVRQTSDKR | YATWYQQKPG | TVTVSSASTKGPSVFPLAPSSKSTSGGTAALGCLVKDY | PDRFSGSRSGNTASLTITG |
| | | | | LEWVASITRGG | QAPILVIYGE | FPEPVTVSWNSGALTSGVHTFPAVLQSSGLYSLSSVVT | AQAEDEADYYCNSRDTGDH |
| | | | | DTTYYPDNVKG | NNRPSGIPDR | VPSSSLGTQTYICNVNHKPSNTKVDKKVEPKSCDKTHT | HLVFGGGTKLTVLGQPKAA |
| | | | | RFTISRENAKN | FSGSRSGNTA | CPPCPAPELLGGPSVFLFPPKPKDTLMISRTPEVTCVV | PSVTLFPPSSEELQANKAT |
| | | | | TLYLQMSSLKS | SLTITGAQAE | VDVSHEDPEVKFNWYVDGVEVHNAKTKPREEQYNSTYR | LVCLISDFYPGAVTVAWKA |
| | | | | DDTALYYCTRG | DEADYYCNSR | VVSVLTVLHQDWLNGKEYKCKVSNKALPAPIEKTISKA | DSSPVKAGVETTTPSKQSN |
| | | | | PLTVGYAMDYW | DTGDHHLVFG | KGQPREPQVYTLPPSREEMTKNQVSLTCLVKGFYPSDI | NKYAASSYLSLTPEQWKSH |
| | | | | GQGTTVTVSS | GGTKLTVL | AVEWESNGQPENNYKTTPPVLDSDGSFFLYSKLTVDKS | RSYSCQVTHEGSTVEKTVA |
| | | | | | | RWQQGNVFSCSVMHEALHNHYTQKSLSLSPGK | PTECS |
| | | | | 3533 | 3534 | 3535 | 3536 |
| 105 | VG9B453 | IgG1 | Lambda | QVQLQQSGPGL | QSALTQPASV | QVQLQQSGPGLVKPSETLSLTCTVSGGSISNYYWSWIR | QSALTQPASVSGSPGQSIT |
| | | | | VKPSETLSLTC | SGSPGQSITI | QPAGKGLGWIGRIYSSGITNYNPSLKSRVTMSVDTSKN | ISCTGTSSDVGGYNYVSWY |
| | | | | TVSGGSISNYY | SCTGTSSDVG | QLSLKLSSVTAADTAVYYCAGIVGVKGAFAIWGQGTMV | QQHPGKAPKLMIYEVSNRP |
| | | | | WSWIRQPAGKG | GYNYVSWYQQ | TVSSASTKGPSVFPLAPSSKSTSGGTAALGCLVKDYFP | SGVSNRFSGSKSGNTASLT |
| | | | | LGWIGRIYSSG | HPGKAPKLMI | EPVTVSWNSGALTSGVHTFPAVLQSSGLYSLSSVVTVP | ISGLQAEDEADYYCSSYTS |
| | | | | ITNYNPSLKSR | YEVSNRPSGV | SSSLGTQTYICNVNHKPSNTKVDKKVEPKSCDKTHTCP | TSVVFGGGTKVTVLGQPKA |
| | | | | VTMSVDTSKNQ | SNRFSGSKSG | PCPAPELLGGPSVFLFPPKPKDTLMISRTPEVTCVVVD | APSVTLFPPSSEELQANKA |
| | | | | LSLKLSSVTAA | NTASLTISGL | VSHEDPEVKFNWYVDGVEVHNAKTKPREEQYNSTYRVV | TLVCLISDFYPGAVTVAWK |
| | | | | DTAVYYCAGIV | QAEDEADYYC | SVLTVLHQDWLNGKEYKCKVSNKALPAPIEKTISKAKG | ADSSPVKAGVETTTPSKQS |
| | | | | GVKGAFAIWGQ | SSYTSTSVVF | QPREPQVYTLPPSREEMTKNQVSLTCLVKGFYPSDIAV | NNKYAASSYLSLTPEQWKS |
| | | | | GTMVTVSS | GGGTKVTVL | EWESNGQPENNYKTTPPVLDSDGSFFLYSKLTVDKSRW | HRSYSCQVTHEGSTVEKTV |
| | | | | | | QQGNVFSCSVMHEALHNHYTQKSLSLSPGK | APTECS |
| | | | | 3567 | 3568 | 3569 | 3570 |
| 106 | VG9B443 | IgG1 | Lambda | QVQLQESGPGL | QSALTQPASV | QVQLQESGPGLVKPSETLSLTCTVSGGSISNYYWSWIR | QSALTQPASVSGSPGQSIT |
| | | | | TVSGGSISNYY | SCTGTSSDVG | QPAGKGLGWIGRIYSSGITNYNPSLKSRVTMSVDTSKN | ISCTGTSSDVGGYNYVSWY |
| | | | | WSWIRQPAGKG | GYNYVSWYQQ | QLSLKLSSVTAADTAVYYCAGIVGVKGAFAIWGQGTMV | QQHPGKAPKLMIYEVSNRP |
| | | | | LGWIGRIYSSG | HPGKAPKLMI | TVSSASTKGPSVFPLAPSSKSTSGGTAALGCLVKDYFP | SGVSNRFSGSKSGNTASLT |
| | | | | ITNYNPSLKSR | YEVSNRPSGV | EPVTVSWNSGALTSGVHTFPAVLQSSGLYSLSSVVTVP | ISGLQAEDEADYYCSSYTS |
| | | | | VTMSVDTSKNQ | SNRFSGSKSG | SSSLGTQTYICNVNHKPSNTKVDKKVEPKSCDKTHTCP | TSVVFGGGTKLTVLGQPKA |
| | | | | LSLKLSSVTAA | NTASLTISGL | PCPAPELLGGPSVFLFPPKPKDTLMISRTPEVTCVVVD | APSVTLFPPSSEELQANKA |
| | | | | DTAVYYCAGIV | QAEDEADYYC | VSHEDPEVKFNWYVDGVEVHNAKTKPREEQYNSTYRVV | TLVCLISDFYPGAVTVAWK |
| | | | | GVKGAFAIWGQ | SSYTSTSVVF | SVLTVLHQDWLNGKEYKCKVSNKALPAPIEKTISKAKG | ADSSPVKAGVETTTPSKQS |
| | | | | GTMVTVSS | GGGTKLTVL | QPREPQVYTLPPSREEMTKNQVSLTCLVKGFYPSDIAV | NNKYAASSYLSLTPEQWKS |
| | | | | | | EWESNGQPENNYKTTPPVLDSDGSFFLYSKLTVDKSRW | HRSYSCQVTHEGSTVEKTV |
| | | | | | | QQGNVFSCSVMHEALHNHYTQKSLSLSPGK | APTECS |
| | | | | 3601 | 3602 | 3603 | 3604 |
| 107 | VG9B455 | IgG1 | Lambda | QVQLVESGPGL | SYELTQPASV | QVQLVESGPGLVKPSETLSLTCTVSGGSISNYYWSWIR | SYELTQPASVSGSPGQSIT |
| | | | | VKPSETLSLTC | SGSPGQSITI | QPAGKGLGWIGRIYSSGITNYNPSLKSRVTMSVDTSKN | ISCTGTSSDVGGYNYVSWY |
| | | | | TVSGGSISNYY | SCTGTSSDVG | QLSLKLSSVTAADTAVYYCAGIVGVKGAFAIWGQGTMV | QQHPGKAPKLMIYEVSNRP |
| | | | | WSWIRQPAGKG | GYNYVSWYQQ | TVSSASTKGPSVFPLAPSSKSTSGGTAALGCLVKDYFP | SGVSNRFSGSKSGNTASLT |
| | | | | LGWIGRIYSSG | HPGKAPKLMI | EPVTVSWNSGALTSGVHTFPAVLQSSGLYSLSSVVTVP | ISGLQAEDEADYYCSSYTS |
| | | | | ITNYNPSLKSR | YEVSNRPSGV | SSSLGTQTYICNVNHKPSNTKVDKKVEPKSCDKTHTCP | TSVVFGGGTKLTVLGQPKA |
| | | | | VTMSVDTSKNQ | SNRFSGSKSG | PCPAPELLGGPSVFLFPPKPKDTLMISRTPEVTCVVVD | APSVTLFPPSSEELQANKA |
| | | | | LSLKLSSVTAA | NTASLTISGL | VSHEDPEVKFNWYVDGVEVHNAKTKPREEQYNSTYRVV | TLVCLISDFYPGAVTVAWK |
| | | | | DTAVYYCAGIV | QAEDEADYYC | SVLTVLHQDWLNGKEYKCKVSNKALPAPIEKTISKAKG | ADSSPVKAGVETTTPSKQS |
| | | | | GVKGAFAIWGQ | SSYTSTSVVF | QPREPQVYTLPPSREEMTKNQVSLTCLVKGFYPSDIAV | NNKYAASSYLSLTPEQWKS |
| | | | | GTMVTVSS | GGGTKLTVL | EWESNGQPENNYKTTPPVLDSDGSFFLYSKLTVDKSRW | HRSYSCQVTHEGSTVEKTV |
| | | | | | | QQGNVFSCSVMHEALHNHYTQKSLSLSPGK | APTECS |
| | | | | 3635 | 3636 | 3637 | 3638 |
| 108 | VG9B466 | IgG1 | Lambda | QVQLVQSGPGL | SYELTQPASV | QVQLVQSGPGLVKPSETLSLTCTVSGGSISNYYWSWIR | SYELTQPASVSGSPGQSIT |
| | | | | VKPSETLSLTC | SGSPGQSITI | QPAGKGLGWIGRIYSSGITNYNPSLKSRVTMSVDTSKN | ISCTGTSSDVGGYNYVSWY |
| | | | | TVSGGSISNYY | SCTGTSSDVG | QLSLKLSSVTAADTAVYYCAGIVGVKGAFAIWGQGTMV | QQHPGKAPKLMIYEVSNRP |
| | | | | WSWIRQPAGKG | GYNYVSWYQQ | TVSSASTKGPSVFPLAPSSKSTSGGTAALGCLVKDYFP | SGVSNRFSGSKSGNTASLT |
| | | | | LGWIGRIYSSG | HPGKAPKLMI | EPVTVSWNSGALTSGVHTFPAVLQSSGLYSLSSVVTVP | ISGLQAEDEADYYCSSYTS |
| | | | | ITNYNPSLKSR | YEVSNRPSGV | SSSLGTQTYICNVNHKPSNTKVDKKVEPKSCDKTHTCP | TSVVFGGGTKLTVLGQPKA |
| | | | | VTMSVDTSKNQ | SNRFSGSKSG | PCPAPELLGGPSVFLFPPKPKDTLMISRTPEVTCVVVD | APSVTLFPPSSEELQANKA |
| | | | | LSLKLSSVTAA | NTASLTISGL | VSHEDPEVKFNWYVDGVEVHNAKTKPREEQYNSTYRVV | TLVCLISDFYPGAVTVAWK |
| | | | | DTAVYYCAGIV | QAEDEADYYC | SVLTVLHQDWLNGKEYKCKVSNKALPAPIEKTISKAKG | ADSSPVKAGVETTTPSKQS |
| | | | | GVKGAFAIWGQ | SSYTSTSVVF | QPREPQVYTLPPSREEMTKNQVSLTCLVKGFYPSDIAV | NNKYAASSYLSLTPEQWKS |
| | | | | GTMVTVSS | GGGTKLTVL | EWESNGQPENNYKTTPPVLDSDGSFFLYSKLTVDKSRW | HRSYSCQVTHEGSTVEKTV |
| | | | | | | QQGNVFSCSVMHEALHNHYTQKSLSLSPGK | APTECS |
| | | | | 3669 | 3670 | 3671 | 3672 |
| 109 | VG9B450 | IgG1 | Lambda | EVQLQESGPGL | QSVLTQPASV | EVQLQESGPGLVKPSETLSLTCTVSGGSISNYYWSWIR | QSVLTQPASVSGSPGQSIT |
| | | | | VKPSETLSLTC | SGSPGQSITI | QPAGKGLGWIGRIYSSGITNYNPSLKSRVTMSVDTSKN | ISCTGTSSDVGGYNYVSWY |
| | | | | TVSGGSISNYY | SCTGTSSDVG | QLSLKLSSVTAADTAVYYCAGIVGVKGAFAIWGQGTMV | QQHPGKAPKLMIYEVSNRP |
| | | | | WSWIRQPAGKG | GYNYVSWYQQ | TVSSASTKGPSVFPLAPSSKSTSGGTAALGCLVKDYFP | SGVSNRFSGSKSGNTASLT |
| | | | | LGWIGRIYSSG | HPGKAPKLMI | EPVTVSWNSGALTSGVHTFPAVLQSSGLYSLSSVVTVP | ISGLQAEDEADYYCSSYTS |
| | | | | ITNYNPSLKSR | YEVSNRPSGV | SSSLGTQTYICNVNHKPSNTKVDKKVEPKSCDKTHTCP | TSVVFGGGTKLTVLGQPKA |
| | | | | VTMSVDTSKNQ | SNRFSGSKSG | PCPAPELLGGPSVFLFPPKPKDTLMISRTPEVTCVVVD | APSVTLFPPSSEELQANKA |
| | | | | LSLKLSSVTAA | NTASLTISGL | VSHEDPEVKFNWYVDGVEVHNAKTKPREEQYNSTYRVV | TLVCLISDFYPGAVTVAWK |
| | | | | DTAVYYCAGIV | QAEDEADYYC | SVLTVLHQDWLNGKEYKCKVSNKALPAPIEKTISKAKG | ADSSPVKAGVETTTPSKQS |
| | | | | GVKGAFAIWGQ | SSYTSTSVVF | QPREPQVYTLPPSREEMTKNQVSLTCLVKGFYPSDIAV | NNKYAASSYLSLTPEQWKS |
| | | | | GTMVTVSS | GGGTKLTVL | EWESNGQPENNYKTTPPVLDSDGSFFLYSKLTVDKSRW | HRSYSCQVTHEGSTVEKTV |
| | | | | | | QQGNVFSCSVMHEALHNHYTQKSLSLSPGK | APTECS |
| | | | | 3703 | 3704 | 3705 | 3706 |
| 110 | VG9B438 | IgG1 | Lambda | EVQLVESGPGL | SYELTQPASV | EVQLVESGPGLVKPSETLSLTCTVSGGSISNYYWSWIR | SYELTQPASVSGSPGQSIT |
| | | | | VKPSETLSLTC | SGSPGQSITI | QPAGKGLGWIGRIYSSGITNYNPSLKSRVTMSVDTSKN | ISCTGTSSDVGGYNYVSWY |
| | | | | TVSGGSISNYY | SCTGTSSDVG | QLSLKLSSVTAADTAVYYCAGIVGVKGAFAIWGQGTMV | QQHPGKAPKLMIYEVSNRP |
| | | | | WSWIRQPAGKG | GYNYVSWYQQ | TVSSASTKGPSVFPLAPSSKSTSGGTAALGCLVKDYFP | SGVSNRFSGSKSGNTASLT |
| | | | | LGWIGRIYSSG | HPGKAPKLMI | EPVTVSWNSGALTSGVHTFPAVLQSSGLYSLSSVVTVP | ISGLQAEDEADYYCSSYTS |
| | | | | ITNYNPSLKSR | YEVSNRPSGV | SSSLGTQTYICNVNHKPSNTKVDKKVEPKSCDKTHTCP | TSVVFGGGTKLTVLGQPKA |
| | | | | VTMSVDTSKNQ | SNRFSGSKSG | PCPAPELLGGPSVFLFPPKPKDTLMISRTPEVTCVVVD | APSVTLFPPSSEELQANKA |
| | | | | LSLKLSSVTAA | NTASLTISGL | VSHEDPEVKFNWYVDGVEVHNAKTKPREEQYNSTYRVV | TLVCLISDFYPGAVTVAWK |
| | | | | DTAVYYCAGIV | QAEDEADYYC | SVLTVLHQDWLNGKEYKCKVSNKALPAPIEKTISKAKG | ADSSPVKAGVETTTPSKQS |
| | | | | GVKGAFAIWGQ | SSYTSTSVVF | QPREPQVYTLPPSREEMTKNQVSLTCLVKGFYPSDIAV | NNKYAASSYLSLTPEQWKS |
| | | | | GTMVTVSS | GGGTKLTVL | EWESNGQPENNYKTTPPVLDSDGSFFLYSKLTVDKSRW | HRSYSCQVTHEGSTVEKTV |
| | | | | | | QQGNVFSCSVMHEALHNHYTQKSLSLSPGK | APTECS |
| | | | | 3737 | 3738 | 3739 | 3740 |
| 111 | VG9B464 | IgG1 | Lambda | EVQLVQSGPGL | QSALTQPASV | EVQLVQSGPGLVKPSETLSLTCTVSGGSISNYYWSWIR | QSALTQPASVSGSPGQSIT |
| | | | | VKPSETLSLTC | SGSPGQSITI | QPAGKGLGWIGRIYSSGITNYNPSLKSRVTMSVDTSKN | ISCTGTSSDVGGYNYVSWY |
| | | | | TVSGGSISNYY | SCTGTSSDVG | QLSLKLSSVTAADTAVYYCAGIVGVKGAFAIWGQGTTV | QQHPGKAPKLMIYEVSNRP |
| | | | | WSWIRQPAGKG | GYNYVSWYQQ | TVSSASTKGPSVFPLAPSSKSTSGGTAALGCLVKDYFP | SGVSNRFSGSKSGNTASLT |
| | | | | LGWIGRIYSSG | HPGKAPKLMI | EPVTVSWNSGALTSGVHTFPAVLQSSGLYSLSSVVTVP | ISGLQAEDEADYYCSSYTS |
| | | | | ITNYNPSLKSR | YEVSNRPSGV | SSSLGTQTYICNVNHKPSNTKVDKKVEPKSCDKTHTCP | TSVVFGGGTKLTVLGQPKA |
| | | | | VTMSVDTSKNQ | SNRFSGSKSG | PCPAPELLGGPSVFLFPPKPKDTLMISRTPEVTCVVVD | APSVTLFPPSSEELQANKA |
| | | | | LSLKLSSVTAA | NTASLTISGL | VSHEDPEVKFNWYVDGVEVHNAKTKPREEQYNSTYRVV | TLVCLISDFYPGAVTVAWK |
| | | | | DTAVYYCAGIV | QAEDEADYYC | SVLTVLHQDWLNGKEYKCKVSNKALPAPIEKTISKAKG | ADSSPVKAGVETTTPSKQS |
| | | | | GVKGAFAIWGQ | SSYTSTSVVF | QPREPQVYTLPPSREEMTKNQVSLTCLVKGFYPSDIAV | NNKYAASSYLSLTPEQWKS |
| | | | | GTTVTVSS | GGGTKLTVL | EWESNGQPENNYKTTPPVLDSDGSFFLYSKLTVDKSRW | HRSYSCQVTHEGSTVEKTV |
| | | | | | | QQGNVFSCSVMHEALHNHYTQKSLSLSPGK | APTECS |
| | | | | 3771 | 3772 | 3773 | 3774 |
| 112 | VG9B437 | IgG1 | Lambda | EVQLQESGPGL | QSALTQPASV | EVQLQESGPGLVKPSETLSLTCTVSGGSISNYYWSWIR | QSALTQPASVSGSPGQSIT |
| | | | | VKPSETLSLTC | SGSPGQSITI | QPAGKGLGWIGRIYSSGITNYNPSLKSRVTMSVDTSKN | ISCTGTSSDVGGYNYVSWY |
| | | | | TVSGGSISNYY | SCTGTSSDVG | QLSLKLSSVTAADTAVYYCAGIVGVKGAFAIWGQGTMV | QQHPGKAPKLMIYEVSNRP |
| | | | | WSWIRQPAGKG | GYNYVSWYQQ | TVSSASTKGPSVFPLAPSSKSTSGGTAALGCLVKDYFP | SGVSNRFSGSKSGNTASLT |
| | | | | LGWIGRIYSSG | HPGKAPKLMI | EPVTVSWNSGALTSGVHTFPAVLQSSGLYSLSSVVTVP | ISGLQAEDEADYYCSSYTS |
| | | | | ITNYNPSLKSR | YEVSNRPSGV | SSSLGTQTYICNVNHKPSNTKVDKKVEPKSCDKTHTCP | TSVVFGGGTKLTVLGQPKA |
| | | | | VTMSVDTSKNQ | SNRFSGSKSG | PCPAPELLGGPSVFLFPPKPKDTLMISRTPEVTCVVVD | APSVTLFPPSSEELQANKA |
| | | | | LSLKLSSVTAA | NTASLTISGL | VSHEDPEVKFNWYVDGVEVHNAKTKPREEQYNSTYRVV | TLVCLISDFYPGAVTVAWK |
| | | | | DTAVYYCAGIV | QAEDEADYYC | SVLTVLHQDWLNGKEYKCKVSNKALPAPIEKTISKAKG | ADSSPVKAGVETTTPSKQS |
| | | | | GVKGAFAIWGQ | SSYTSTSVVF | QPREPQVYTLPPSREEMTKNQVSLTCLVKGFYPSDIAV | NNKYAASSYLSLTPEQWKS |
| | | | | GTMVTVSS | GGGTKLTVL | EWESNGQPENNYKTTPPVLDSDGSFFLYSKLTVDKSRW | HRSYSCQVTHEGSTVEKTV |
| | | | | | | QQGNVFSCSVMHEALHNHYTQKSLSLSPGK | APTECS |
| | | | | 3805 | 3806 | 3807 | 3808 |
| 113 | VG9B457 | IgG1 | Lambda | EVQLVESGPGL | QAVLTQPASV | EVQLVESGPGLVKPSETLSLTCTVSGGSISNYYWSWIR | QAVLTQPASVSGSPGQSIT |
| | | | | VKPSETLSLTC | SGSPGQSITI | QPAGKGLGWIGRIYSSGITNYNPSLKSRVTMSVDTSKN | ISCTGTSSDVGGYNYVSWY |
| | | | | TVSGGSISNYY | SCTGTSSDVG | QLSLKLSSVTAADTAVYYCAGIVGVKGAFAIWGQGTMV | QQHPGKAPKLMIYEVSNRP |
| | | | | WSWIRQPAGKG | GYNYVSWYQQ | TVSSASTKGPSVFPLAPSSKSTSGGTAALGCLVKDYFP | SGVSNRFSGSKSGNTASLT |
| | | | | LGWIGRIYSSG | HPGKAPKLMI | EPVTVSWNSGALTSGVHTFPAVLQSSGLYSLSSVVTVP | ISGLQAEDEADYYCSSYTS |
| | | | | ITNYNPSLKSR | YEVSNRPSGV | SSSLGTQTYICNVNHKPSNTKVDKKVEPKSCDKTHTCP | TSVVFGGGTKLTVLGQPKA |
| | | | | VTMSVDTSKNQ | SNRFSGSKSG | PCPAPELLGGPSVFLFPPKPKDTLMISRTPEVTCVVVD | APSVTLFPPSSEELQANKA |
| | | | | LSLKLSSVTAA | NTASLTISGL | VSHEDPEVKFNWYVDGVEVHNAKTKPREEQYNSTYRVV | TLVCLISDFYPGAVTVAWK |
| | | | | DTAVYYCAGIV | QAEDEADYYC | SVLTVLHQDWLNGKEYKCKVSNKALPAPIEKTISKAKG | ADSSPVKAGVETTTPSKQS |
| | | | | GVKGAFAIWGQ | SSYTSTSVVF | QPREPQVYTLPPSREEMTKNQVSLTCLVKGFYPSDIAV | NNKYAASSYLSLTPEQWKS |
| | | | | GTMVTVSS | GGGTKLTVL | EWESNGQPENNYKTTPPVLDSDGSFFLYSKLTVDKSRW | HRSYSCQVTHEGSTVEKTV |
| | | | | | | QQGNVFSCSVMHEALHNHYTQKSLSLSPGK | APTECS |
| | | | | 3839 | 3840 | 3841 | 3842 |
| 114 | VG9B442 | IgG1 | Lambda | QVQLVESGPGL | QSALTQPASV | QVQLVESGPGLVKPSETLSLTCTVSGGSISNYYWSWIR | QSALTQPASVSGSPGQSIT |
| | | | | VKPSETLSLTC | SGSPGQSITI | QPAGKGLGWIGRIYSSGITNYNPSLKSRVTMSVDTSKN | ISCTGTSSDVGGYNYVSWY |
| | | | | TVSGGSISNYY | SCTGTSSDVG | QLSLKLSSVTAADTAVYYCAGIVGVKGAFAIWGQGTMV | QQHPGKAPKLMIYEVSNRP |
| | | | | WSWIRQPAGKG | GYNYVSWYQQ | TVSSASTKGPSVFPLAPSSKSTSGGTAALGCLVKDYFP | SGVSNRFSGSKSGNTASLT |
| | | | | LGWIGRIYSSG | HPGKAPKLMI | EPVTVSWNSGALTSGVHTFPAVLQSSGLYSLSSVVTVP | ISGLQAEDEADYYCSSYTS |
| | | | | ITNYNPSLKSR | YEVSNRPSGV | SSSLGTQTYICNVNHKPSNTKVDKKVEPKSCDKTHTCP | TSVVFGGGTKVTVLGQPKA |
| | | | | VTMSVDTSKNQ | SNRFSGSKSG | PCPAPELLGGPSVFLFPPKPKDTLMISRTPEVTCVVVD | APSVTLFPPSSEELQANKA |
| | | | | LSLKLSSVTAA | NTASLTISGL | VSHEDPEVKFNWYVDGVEVHNAKTKPREEQYNSTYRVV | TLVCLISDFYPGAVTVAWK |
| | | | | DTAVYYCAGIV | QAEDEADYYC | SVLTVLHQDWLNGKEYKCKVSNKALPAPIEKTISKAKG | ADSSPVKAGVETTTPSKQS |
| | | | | GVKGAFAIWGQ | SSYTSTSVVF | QPREPQVYTLPPSREEMTKNQVSLTCLVKGFYPSDIAV | NNKYAASSYLSLTPEQWKS |
| | | | | GTMVTVSS | GGGTKVTVL | EWESNGQPENNYKTTPPVLDSDGSFFLYSKLTVDKSRW | HRSYSCQVTHEGSTVEKTV |
| | | | | | | QQGNVFSCSVMHEALHNHYTQKSLSLSPGK | APTECS |
| | | | | 3873 | 3874 | 3875 | 3876 |
| 115 | VG9B436 | IgG1 | Lambda | EVQLVESGPGL | QSVLTQPASV | EVQLVESGPGLVKPSETLSLTCTVSGGSISNYYWSWIR | QSVLTQPASVSGSPGQSIT |
| | | | | VKPSETLSLTC | SGSPGQSITI | QPAGKGLGWIGRIYSSGITNYNPSLKSRVTMSVDTSKN | ISCTGTSSDVGGYNYVSWY |
| | | | | TVSGGSISNYY | SCTGTSSDVG | QLSLKLSSVTAADTAVYYCAGIVGVKGAFAIWGQGTMV | QQHPGKAPKLMIYEVSNRP |
| | | | | WSWIRQPAGKG | GYNYVSWYQQ | TVSSASTKGPSVFPLAPSSKSTSGGTAALGCLVKDYFP | SGVSNRFSGSKSGNTASLT |
| | | | | LGWIGRIYSSG | HPGKAPKLMI | EPVTVSWNSGALTSGVHTFPAVLQSSGLYSLSSVVTVP | ISGLQAEDEADYYCSSYTS |
| | | | | ITNYNPSLKSR | YEVSNRPSGV | SSSLGTQTYICNVNHKPSNTKVDKKVEPKSCDKTHTCP | TSVVFGGGTKLTVLGQPKA |
| | | | | VTMSVDTSKNQ | SNRFSGSKSG | PCPAPELLGGPSVFLFPPKPKDTLMISRTPEVTCVVVD | APSVTLFPPSSEELQANKA |
| | | | | LSLKLSSVTAA | NTASLTISGL | VSHEDPEVKFNWYVDGVEVHNAKTKPREEQYNSTYRVV | TLVCLISDFYPGAVTVAWK |
| | | | | DTAVYYCAGIV | QAEDEADYYC | SVLTVLHQDWLNGKEYKCKVSNKALPAPIEKTISKAKG | ADSSPVKAGVETTTPSKQS |
| | | | | GVKGAFAIWGQ | SSYTSTSVVF | QPREPQVYTLPPSREEMTKNQVSLTCLVKGFYPSDIAV | NNKYAASSYLSLTPEQWKS |
| | | | | GTMVTVSS | GGGTKLTVL | EWESNGQPENNYKTTPPVLDSDGSFFLYSKLTVDKSRW | HRSYSCQVTHEGSTVEKTV |
| | | | | | | QQGNVFSCSVMHEALHNHYTQKSLSLSPGK | APTECS |
| | | | | 3907 | 3908 | 3909 | 3910 |
| 116 | VG9B434 | IgG1 | Lambda | QVQLQESGPGL | QSVLTQPASV | QVQLQESGPGLVKPSETLSLTCTVSGGSISNYYWSWIR | QSVLTQPASVSGSPGQSIT |
| | | | | VKPSETLSLTC | SGSPGQSITI | QPAGKGLGWIGRIYSSGITNYNPSLKSRVTMSVDTSKN | ISCTGTSSDVGGYNYVSWY |
| | | | | TVSGGSISNYY | SCTGTSSDVG | QLSLKLSSVTAADTAVYYCAGIVGVKGAFAIWGQGTMV | QQHPGKAPKLMIYEVSNRP |
| | | | | WSWIRQPAGKG | GYNYVSWYQQ | TVSSASTKGPSVFPLAPSSKSTSGGTAALGCLVKDYFP | SGVSNRFSGSKSGNTASLT |
| | | | | LGWIGRIYSSG | HPGKAPKLMI | EPVTVSWNSGALTSGVHTFPAVLQSSGLYSLSSVVTVP | ISGLQAEDEADYYCSSYTS |
| | | | | ITNYNPSLKSR | YEVSNRPSGV | SSSLGTQTYICNVNHKPSNTKVDKKVEPKSCDKTHTCP | TSVVFGGGTKLTVLGQPKA |
| | | | | VTMSVDTSKNQ | SNRFSGSKSG | PCPAPELLGGPSVFLFPPKPKDTLMISRTPEVTCVVVD | APSVTLFPPSSEELQANKA |
| | | | | LSLKLSSVTAA | NTASLTISGL | VSHEDPEVKFNWYVDGVEVHNAKTKPREEQYNSTYRVV | TLVCLISDFYPGAVTVAWK |
| | | | | DTAVYYCAGIV | QAEDEADYYC | SVLTVLHQDWLNGKEYKCKVSNKALPAPIEKTISKAKG | ADSSPVKAGVETTTPSKQS |
| | | | | GVKGAFAIWGQ | SSYTSTSVVF | QPREPQVYTLPPSREEMTKNQVSLTCLVKGFYPSDIAV | NNKYAASSYLSLTPEQWKS |
| | | | | GTMVTVSS | GGGTKLTVL | EWESNGQPENNYKTTPPVLDSDGSFFLYSKLTVDKSRW | HRSYSCQVTHEGSTVEKTV |
| | | | | | | QQGNVFSCSVMHEALHNHYTQKSLSLSPGK | APTECS |
| | | | | 3941 | 3942 | 3943 | 3944 |
| 117 | VG9B460 | IgG1 | Lambda | EVQLVESGPGL | QLVLTQPASV | EVQLVESGPGLVKPSETLSLTCTVSGGSISNYYWSWIR | QLVLTQPASVSGSPGQSIT |
| | | | | VKPSETLSLTC | SGSPGQSITI | QPAGKGLGWIGRIYSSGITNYNPSLKSRVTMSVDTSKN | ISCTGTSSDVGGYNYVSWY |
| | | | | TVSGGSISNYY | SCTGTSSDVG | QLSLKLSSVTAADTAVYYCAGIVGVKGAFAIWGQGTMV | QQHPGKAPKLMIYEVSNRP |
| | | | | WSWIRQPAGKG | GYNYVSWYQQ | TVSSASTKGPSVFPLAPSSKSTSGGTAALGCLVKDYFP | SGVSNRFSGSKSGNTASLT |
| | | | | LGWIGRIYSSG | HPGKAPKLMI | EPVTVSWNSGALTSGVHTFPAVLQSSGLYSLSSVVTVP | ISGLQAEDEADYYCSSYTS |
| | | | | ITNYNPSLKSR | YEVSNRPSGV | SSSLGTQTYICNVNHKPSNTKVDKKVEPKSCDKTHTCP | TSVVFGGGTKLTVLGQPKA |
| | | | | VTMSVDTSKNQ | SNRFSGSKSG | PCPAPELLGGPSVFLFPPKPKDTLMISRTPEVTCVVVD | APSVTLFPPSSEELQANKA |
| | | | | LSLKLSSVTAA | NTASLTISGL | VSHEDPEVKFNWYVDGVEVHNAKTKPREEQYNSTYRVV | TLVCLISDFYPGAVTVAWK |
| | | | | DTAVYYCAGIV | QAEDEADYYC | SVLTVLHQDWLNGKEYKCKVSNKALPAPIEKTISKAKG | ADSSPVKAGVETTTPSKQS |
| | | | | GVKGAFAIWGQ | SSYTSTSVVF | QPREPQVYTLPPSREEMTKNQVSLTCLVKGFYPSDIAV | NNKYAASSYLSLTPEQWKS |
| | | | | GTMVTVSS | GGGTKLTVL | EWESNGQPENNYKTTPPVLDSDGSFFLYSKLTVDKSRW | HRSYSCQVTHEGSTVEKTV |
| | | | | | | QQGNVFSCSVMHEALHNHYTQKSLSLSPGK | APTECS |
| | | | | 3975 | 3976 | 3977 | 3978 |
| 118 | VG9B189 | IgG1 | Lambda | EVQLVQSGGGL | QSVVTQPPSA | EVQLVQSGGGLVKPGASLKLSCAASGFTFSNHGMSWVR | QSVVTQPPSASGSPGQSVT |
| | | | | VKPGASLKLSC | SGSPGQSVTI | QTSDKRLEWVASITRGGDTTYYPDNVKGRFTISRENAK | ISCTGTSSDVGGYNYVSWY |
| | | | | AASGFTFSNHG | SCTGTSSDVG | NTLYLQMSSLKSDDTALYYCTRGPLTVGYAMDYWGQGT | QQHPGKAPKLMIYEVSKRP |
| | | | | MSWVRQTSDKR | GYNYVSWYQQ | TVTVSSASTKGPSVFPLAPSSKSTSGGTAALGCLVKDY | SGVPDRFSGSKSGNTASLT |
| | | | | LEWVASITRGG | HPGKAPKLMI | FPEPVTVSWNSGALTSGVHTFPAVLQSSGLYSLSSVVT | VSGLQAEDEADYYCNSYAG |
| | | | | DTTYYPDNVKG | YEVSKRPSGV | VPSSSLGTQTYICNVNHKPSNTKVDKKVEPKSCDKTHT | SNNFEVFGGGTKVTVLGQP |
| | | | | RFTISRENAKN | PDRFSGSKSG | CPPCPAPELLGGPSVFLFPPKPKDTLMISRTPEVTCVV | KAAPSVTLFPPSSEELQAN |
| | | | | TLYLQMSSLKS | NTASLTVSGL | VDVSHEDPEVKFNWYVDGVEVHNAKTKPREEQYNSTYR | KATLVCLISDFYPGAVTVA |
| | | | | DDTALYYCTRG | QAEDEADYYC | VVSVLTVLHQDWLNGKEYKCKVSNKALPAPIEKTISKA | WKADSSPVKAGVETTTPSK |
| | | | | PLTVGYAMDYW | NSYAGSNNFE | KGQPREPQVYTLPPSREEMTKNQVSLTCLVKGFYPSDI | QSNNKYAASSYLSLTPEQW |
| | | | | GQGTTVTVSS | VFGGGTKVTV | AVEWESNGQPENNYKTTPPVLDSDGSFFLYSKLTVDKS | KSHRSYSCQVTHEGSTVEK |
| | | | | | L | RWQQGNVFSCSVMHEALHNHYTQKSLSLSPGK | TVAPTECS |
| | | | | 4009 | 4010 | 4011 | 4012 |
| 119 | VG9B452 | IgG1 | Lambda | QVQLVESGPGL | QSALTQPASV | VQLVESGPGLVKPSETLSLTCTVSGGSISNYYWSWIR | QSALTQPASVSGSPGQSIT |
| | | | | VKPSETLSLTC | SGSPGQSITI | QPAGKGLGWIGRIYSSGITNYNPSLKSRVTMSVDTSKN | ISCTGTSSDVGGYNYVSWY |
| | | | | TVSGGSISNYY | SCTGTSSDVG | QLSLKLSSVTAADTAVYYCAGIVGVKGAFAIWGQGTMV | QQHPGKAPKLMIYEVSNRP |
| | | | | WSWIRQPAGKG | GYNYVSWYQQ | TVSSASTKGPSVFPLAPSSKSTSGGTAALGCLVKDYFP | SGVSNRFSGSKSGNTASLT |
| | | | | LGWIGRIYSSG | HPGKAPKLMI | EPVTVSWNSGALTSGVHTFPAVLQSSGLYSLSSVVTVP | ISGLQAEDEADYYCSSYTS |
| | | | | ITNYNPSLKSR | YEVSNRPSGV | SSSLGTQTYICNVNHKPSNTKVDKKVEPKSCDKTHTCP | TSVVFGGGTKLTVLGQPKA |
| | | | | VTMSVDTSKNQ | SNRFSGSKSG | PCPAPELLGGPSVFLFPPKPKDTLMISRTPEVTCVVVD | APSVTLFPPSSEELQANKA |
| | | | | LSLKLSSVTAA | NTASLTISGL | VSHEDPEVKFNWYVDGVEVHNAKTKPREEQYNSTYRVV | TLVCLISDFYPGAVTVAWK |
| | | | | DTAVYYCAGIV | QAEDEADYYC | SVLTVLHQDWLNGKEYKCKVSNKALPAPIEKTISKAKG | ADSSPVKAGVETTTPSKQS |
| | | | | GVKGAFAIWGQ | SSYTSTSVVF | QPREPQVYTLPPSREEMTKNQVSLTCLVKGFYPSDIAV | NNKYAASSYLSLTPEQWKS |
| | | | | GTMVTVSS | GGGTKLTVL | EWESNGQPENNYKTTPPVLDSDGSFFLYSKLTVDKSRW | HRSYSCQVTHEGSTVEKTV |
| | | | | | | QQGNVFSCSVMHEALHNHYTQKSLSLSPGK | APTECS |
| | | | | 4043 | 4044 | 4045 | 4046 |
| 120 | VG9B53 | IgG1 | Kappa | QVQLQESGPGL | DIQMTQSPLS | QVQLQESGPGLVKPSETLSLTCTVSGGSISSYYWSWIR | DIQMTQSPLSLPVTPGEPA |
| | | | | VKPSETLSLTC | LPVTPGEPAS | QPAGKGLEWIGRIHTIGSINYNPSLKSRVTMSVDTSKN | SISCRSSQSLLHSNGYNYL |
| | | | | TVSGGSISSYY | ISCRSSQSLL | QFSLKLSSVTAADTAVYYCAMEGVGATNYYYGMAVWGR | DWYLQKPGQSPQLLIYLGS |
| | | | | WSWIRQPAGKG | HSNGYNYLDW | GTMVTVSSASTKGPSVFPLAPSSKSTSGGTAALGCLVK | NRASGVPDRFSGSGSGTDF |
| | | | | LEWIGRIHTIG | YLQKPGQSPQ | DYFPEPVTVSWNSGALTSGVHTFPAVLQSSGLYSLSSV | TLKISRVEAEDVGVYYCMQ |
| | | | | SINYNPSLKSR | LLIYLGSNRA | VTVPSSSLGTQTYICNVNHKPSNTKVDKKVEPKSCDKT | ALQTPYTFGQGTKVEIKRT |
| | | | | VTMSVDTSKNQ | SGVPDRFSGS | HTCPPCPAPELLGGPSVFLFPPKPKDTLMISRTPEVTC | VAAPSVFIFPPSDEQLKSG |
| | | | | FSLKLSSVTAA | GSGTDFTLKI | VVVDVSHEDPEVKFNWYVDGVEVHNAKTKPREEQYNST | TASVVCLLNNFYPREAKVQ |
| | | | | DTAVYYCAMEG | SRVEAEDVGV | YRVVSVLTVLHQDWLNGKEYKCKVSNKALPAPIEKTIS | WKVDNALQSGNSQESVTEQ |
| | | | | VGATNYYYGMA | YYCMQALQTP | KAKGQPREPQVYTLPPSREEMTKNQVSLTCLVKGFYPS | DSKDSTYSLSSTLTLSKAD |
| | | | | VWGRGTMVTVS | YTFGQGTKVE | DIAVEWESNGQPENNYKTTPPVLDSDGSFFLYSKLTVD | YEKHKVYACEVTHQGLSSP |
| | | | | S | IK | KSRWQQGNVFSCSVMHEALHNHYTQKSLSLSPGK | VTKSFNRGEC |
| | | | | 4077 | 4078 | 4079 | 4080 |
| 121 | VG9B41 | IgG1 | Kappa | QVQLQESGPQL | EIVLTQTPLS | QVQLQESGPQLVRPGASVKISCKASGYSFTTYWMHWVK | EIVLTQTPLSSPVTLGQPA |
| | | | | VRPGASVKISC | SPVTLGQPAS | QRPGQGLEWIGLIDPSDSETRLNQKFKDKATLTVDKSS | SISCRSSQSLVHSDGNTYL |
| | | | | KASGYSFTTYW | ISCRSSQSLV | STAYMRLSSPTSEDSAVYYCASNRWLLGWGQGTMVTVS | SWLHQRPGQPPRLLIYKIS |
| | | | | MHWVKQRPGQG | HSDGNTYLSW | SASTKGPSVFPLAPSSKSTSGGTAALGCLVKDYFPEPV | NRFSGVPDRFSGSGAGTDF |
| | | | | LEWIGLIDPSD | LHQRPGQPPR | TVSWNSGALTSGVHTFPAVLQSSGLYSLSSVVTVPSSS | TLKISRVETEDVGVYYCVQ |
| | | | | SETRLNQKFKD | LLIYKISNRF | LGTQTYICNVNHKPSNTKVDKKVEPKSCDKTHTCPPCP | TREFPLTFGGGTKVEIKRT |
| | | | | KATLTVDKSSS | SGVPDRFSGS | APELLGGPSVFLFPPKPKDTLMISRTPEVTCVVVDVSH | VAAPSVFIFPPSDEQLKSG |
| | | | | TAYMRLSSPTS | GAGTDFTLKI | EDPEVKFNWYVDGVEVHNAKTKPREEQYNSTYRVVSVL | TASVVCLLNNFYPREAKVQ |
| | | | | EDSAVYYCASN | SRVETEDVGV | TVLHQDWLNGKEYKCKVSNKALPAPIEKTISKAKGQPR | WKVDNALQSGNSQESVTEQ |
| | | | | RWLLGWGQGTM | YYCVQTREFP | EPQVYTLPPSREEMTKNQVSLTCLVKGFYPSDIAVEWE | DSKDSTYSLSSTLTLSKAD |
| | | | | VTVSS | LTFGGGTKVE | SNGQPENNYKTTPPVLDSDGSFFLYSKLTVDKSRWQQG | YEKHKVYACEVTHQGLSSP |
| | | | | | IK | NVFSCSVMHEALHNHYTQKSLSLSPGK | VTKSFNRGEC |
| | | | | 4111 | 4112 | 4113 | 4114 |
| 122 | VG9B136 | IgG1 | Kappa | QVQLQQSGPGL | DIVMTQSPSF | QVQLQQSGPGLVKPSQTLSLTCAISGDSVSSNRAAWNW | DIVMTQSPSFLSTFVGDRV |
| | | | | VKPSQTLSLTC | LSTFVGDRVT | IRQSPSKGLEWLGRTYYRSKWYNEYAASVKSRMSINPD | TITCRASQGISSYLAWYQQ |
| | | | | AISGDSVSSNR | ITCRASQGIS | TSKNQFSLQLNSVTPEDTALYYCARDLWELREACDIWG | KPGKVPKLLIYVASTLQSG |
| | | | | AAWNWIRQSPS | SYLAWYQQKP | QGTMVTVSSASTKGPSVFPLAPSSKSTSGGTAALGCLV | VPSRFSGSGSGTEFTLTIS |
| | | | | KGLEWLGRTYY | GKVPKLLIYV | KDYFPEPVTVSWNSGALTSGVHTFPAVLQSSGLYSLSS | SLQPEDFATYYCQQLNSYP |
| | | | | RSKWYNEYAAS | ASTLQSGVPS | VVTVPSSSLGTQTYICNVNHKPSNTKVDKKVEPKSCDK | FTFGPGTKVDIKRTVAAPS |
| | | | | VKSRMSINPDT | RFSGSGSGTE | THTCPPCPAPELLGGPSVFLFPPKPKDTLMISRTPEVT | VFIFPPSDEQLKSGTASVV |
| | | | | SKNQFSLQLNS | FTLTISSLQP | CVVVDVSHEDPEVKFNWYVDGVEVHNAKTKPREEQYNS | CLLNNFYPREAKVQWKVDN |
| | | | | VTPEDTALYYC | EDFATYYCQQ | TYRVVSVLTVLHQDWLNGKEYKCKVSNKALPAPIEKTI | ALQSGNSQESVTEQDSKDS |
| | | | | ARDLWELREAC | LNSYPFTFGP | SKAKGQPREPQVYTLPPSREEMTKNQVSLTCLVKGFYP | TYSLSSTLTLSKADYEKHK |
| | | | | DIWGQGTMVTV | GTKVDIK | SDIAVEWESNGQPENNYKTTPPVLDSDGSFFLYSKLTV | VYACEVTHQGLSSPVTKSF |
| | | | | SS | | DKSRWQQGNVFSCSVMHEALHNHYTQKSLSLSPGK | NRGEC |
| | | | | 4145 | 4146 | 4147 | 4148 |
| 123 | VG9B399 | IgG1 | Kappa | EVQLVESGGGL | ETTLTQSPGT | EVQLVESGGGLVKPGGSLRLSCSASGFTFSNYDMNWVR | ETTLTQSPGTLSLSPGDRA |
| | | | | VKPGGSLRLSC | LSLSPGDRAT | QAPGKGLEWVSSISSSSSYIYYADSVKGRFTISRDNAK | TLSCRASQSVASSYLAWYQ |
| | | | | SASGFTFSNYD | LSCRASQSVA | NSLYLQMNSLRAEDTAVYHCARDVGVTTDYYYYGMDVW | QKPGQSPRLLIYGASSRAT |
| | | | | MNWVRQAPGKG | SSYLAWYQQK | GQGTMVTVSSASTKGPSVFPLAPSSKSTSGGTAALGCL | GIPDRFSGSGSGTDFTLTI |
| | | | | LEWVSSISSSS | PGQSPRLLIY | VKDYFPEPVTVSWNSGALTSGVHTFPAVLQSSGLYSLS | SRLEPEDFAVYYCQQYGSS |
| | | | | SYIYYADSVKG | GASSRATGIP | SVVTVPSSSLGTQTYICNVNHKPSNTKVDKKVEPKSCD | PPYTFGQGTKVDIKRTVAA |
| | | | | RFTISRDNAKN | DRFSGSGSGT | KTHTCPPCPAPELLGGPSVFLFPPKPKDTLMISRTPEV | PSVFIFPPSDEQLKSGTAS |
| | | | | SLYLQMNSLRA | DFTLTISRLE | TCVVVDVSHEDPEVKFNWYVDGVEVHNAKTKPREEQYN | VVCLLNNFYPREAKVQWKV |
| | | | | EDTAVYHCARD | PEDFAVYYCQ | STYRVVSVLTVLHQDWLNGKEYKCKVSNKALPAPIEKT | DNALQSGNSQESVTEQDSK |
| | | | | VGVTTDYYYYG | QYGSSPPYTF | ISKAKGQPREPQVYTLPPSREEMTKNQVSLTCLVKGFY | DSTYSLSSTLTLSKADYEK |
| | | | | MDVWGQGTMVT | GQGTKVDIK | PSDIAVEWESNGQPENNYKTTPPVLDSDGSFFLYSKLT | HKVYACEVTHQGLSSPVTK |
| | | | | VSS | | VDKSRWQQGNVFSCSVMHEALHNHYTQKSLSLSPGK | SFNRGEC |
| | | | | 4179 | 4180 | 4181 | 4182 |
| 124 | VG9B369 | IgG1 | Kappa | EVQLLESGPTL | DIVMTQSPSS | EVQLLESGPTLVKPTQTLTLTCTFSGFSLSTIGVGVGW | DIVMTQSPSSLSASVGDRV |
| | | | | VKPTQTLTLTC | LSASVGDRVT | IRQPPGKALEWLSLIYWNDDKRYNPSLKSRLTITKDTS | TITCQASQDISHYLNWYQQ |
| | | | | TFSGFSLSTIG | ITCQASQDIS | KNQVVLTMTNMDPVDTATYYCAHSHDWVHAFDIWGQGT | KPGKAPKFLIYDASNLDTG |
| | | | | VGVGWIRQPPG | HYLNWYQQKP | MVTVSSASTKGPSVFPLAPSSKSTSGGTAALGCLVKDY | VPSRFSGSGSGTDFTFTIS |
| | | | | KALEWLSLIYW | GKAPKFLIYD | FPEPVTVSWNSGALTSGVHTFPAVLQSSGLYSLSSVVT | SLQPEDIATYYCQQYDNFP |
| | | | | NDDKRYNPSLK | ASNLDTGVPS | VPSSSLGTQTYICNVNHKPSNTKVDKKVEPKSCDKTHT | LTFGGGTKVEIKRTVAAPS |
| | | | | SRLTITKDTSK | RFSGSGSGTD | CPPCPAPELLGGPSVFLFPPKPKDTLMISRTPEVTCVV | VFIFPPSDEQLKSGTASVV |
| | | | | NQVVLTMTNMD | FTFTISSLQP | VDVSHEDPEVKFNWYVDGVEVHNAKTKPREEQYNSTYR | CLLNNFYPREAKVQWKVDN |
| | | | | PVDTATYYCAH | EDIATYYCQQ | VVSVLTVLHQDWLNGKEYKCKVSNKALPAPIEKTISKA | ALQSGNSQESVTEQDSKDS |
| | | | | SHDWVHAFDIW | YDNFPLTFGG | KGQPREPQVYTLPPSREEMTKNQVSLTCLVKGFYPSDI | TYSLSSTLTLSKADYEKHK |
| | | | | GQGTMVTVSS | GTKVEIK | AVEWESNGQPENNYKTTPPVLDSDGSFFLYSKLTVDKS | VYACEVTHQGLSSPVTKSF |
| | | | | | | RWQQGNVFSCSVMHEALHNHYTQKSLSLSPGK | NRGEC |
| | | | | 4213 | 4214 | 4215 | 4216 |
| 125 | VG9B144 | IgG1 | Lambda | QVQLVQSGAEV | SSELTQDPAV | QVQLVQSGAEVKKPGASVKVSCKASGYTFTGYYMHWMR | SSELTQDPAVSVALGQTVR |
| | | | | KKPGASVKVSC | SVALGQTVRI | QAPGQGLEWMGWINPNSGATNKEQKFQGRVTMTRDTSI | ITCQGDNLRNYYATWFQQK |
| | | | | KASGYTFTGYY | TCQGDNLRNY | STAYMELSRLRSDDTAVYYCAREDDAFDVWGQGTMVTV | PGQAPVLVFFGKNNRPSGI |
| | | | | MHWMRQAPGQG | YATWFQQKPG | SSASTKGPSVFPLAPSSKSTSGGTAALGCLVKDYFPEP | PDRFSGSSSGDTASLTITG |
| | | | | LEWMGWINPNS | QAPVLVFFGK | VTVSWNSGALTSGVHTFPAVLQSSGLYSLSSVVTVPSS | AQAEDEADYYCNSRDSSGN |
| | | | | GATNKEQKFQG | NNRPSGIPDR | SLGTQTYICNVNHKPSNTKVDKKVEPKSCDKTHTCPPC | HVVFGGGTKLTVLGQPKAA |
| | | | | RVTMTRDTSIS | FSGSSSGDTA | PAPELLGGPSVFLFPPKPKDTLMISRTPEVTCVVVDVS | PSVTLFPPSSEELQANKAT |
| | | | | TAYMELSRLRS | SLTITGAQAE | HEDPEVKFNWYVDGVEVHNAKTKPREEQYNSTYRVVSV | LVCLISDFYPGAVTVAWKA |
| | | | | DDTAVYYCARE | DEADYYCNSR | LTVLHQDWLNGKEYKCKVSNKALPAPIEKTISKAKGQP | DSSPVKAGVETTTPSKQSN |
| | | | | DDAFDVWGQGT | DSSGNHVVFG | REPQVYTLPPSREEMTKNQVSLTCLVKGFYPSDIAVEW | NKYAASSYLSLTPEQWKSH |
| | | | | MVTVSS | GGTKLTVL | ESNGQPENNYKTTPPVLDSDGSFFLYSKLTVDKSRWQQ | RSYSCQVTHEGSTVEKTVA |
| | | | | | | GNVFSCSVMHEALHNHYTQKSLSLSPGK | PTECS |
| | | | | 4247 | 4248 | 4249 | 4250 |
| 126 | VG9B410 | IgG1 | Kappa | EVQLVESGGGL | DIQMTQSPSS | EVQLVESGGGLVKPGGSLRLSCAASGFTFSNYGMNWVR | DIQMTQSPSSVSASVGDRV |
| | | | | VKPGGSLRLSC | VSASVGDRVT | QAPGKGLEWVSYISSGSSYKYYADSMKGRFTISRDNAM | TITCRASQGINSWLAWYQQ |
| | | | | AASGFTFSNYG | ITCRASQGIN | NLLYLQMNSLRPEDSAMYYCARDPVVTEYYYYGMDVWG | KPGNAPKLLIYAASSLQSG |
| | | | | MNWVRQAPGKG | SWLAWYQQKP | QGTTVTVSSASTKGPSVFPLAPSSKSTSGGTAALGCLV | VPSRFSGIGSGTDFIFTIS |
| | | | | LEWVSYISSGS | GNAPKLLIYA | KDYFPEPVTVSWNSGALTSGVHTFPAVLQSSGLYSLSS | SLQPEDFASYYCQQANSFP |
| | | | | SYKYYADSMKG | ASSLQSGVPS | VVTVPSSSLGTQTYICNVNHKPSNTKVDKKVEPKSCDK | WTFGQGTKVEIKRTVAAPS |
| | | | | RFTISRDNAMN | RFSGIGSGTD | THTCPPCPAPELLGGPSVFLFPPKPKDTLMISRTPEVT | VFIFPPSDEQLKSGTASVV |
| | | | | LLYLQMNSLRP | FIFTISSLQP | CVVVDVSHEDPEVKFNWYVDGVEVHNAKTKPREEQYNS | CLLNNFYPREAKVQWKVDN |
| | | | | EDSAMYYCARD | EDFASYYCQQ | TYRVVSVLTVLHQDWLNGKEYKCKVSNKALPAPIEKTI | ALQSGNSQESVTEQDSKDS |
| | | | | PVVTEYYYYGM | ANSFPWTFGQ | SKAKGQPREPQVYTLPPSREEMTKNQVSLTCLVKGFYP | TYSLSSTLTLSKADYEKHK |
| | | | | DVWGQGTTVTV | GTKVEIK | SDIAVEWESNGQPENNYKTTPPVLDSDGSFFLYSKLTV | VYACEVTHQGLSSPVTKSF |
| | | | | SS | | DKSRWQQGNVFSCSVMHEALHNHYTQKSLSLSPGK | NRGEC |
| | | | | 4281 | 4282 | 4283 | 4284 |
| 127 | VG9B386 | IgG1 | Kappa | EVQLVESGGGL | EIVMTQSPGT | EVQLVESGGGLVKPGGSLRLSCAASGFTFSSYSMIWVR | EIVMTQSPGTLSLSPGERA |
| | | | | VKPGGSLRLSC | LSLSPGERAT | QAPGKGLEWVSSIGSSSTYIYYADSVRGRFTISRDNAK | TLSCRASQSISRSYLAWYQ |
| | | | | AASGFTFSSYS | LSCRASQSIS | TSLYLQMNSLRAEDTAMYFCARDGETGGFDYWGQGILV | QKPGQPPRLLIYGPSNRAT |
| | | | | MIWVRQAPGKG | RSYLAWYQQK | TVSSASTKGPSVFPLAPSSKSTSGGTAALGCLVKDYFP | GIPDRFSASGSGTDFTLTN |
| | | | | LEWVSSIGSSS | PGQPPRLLIY | EPVTVSWNSGALTSGVHTFPAVLQSSGLYSLSSVVTVP | SRLEPEDFAVYYCQQYGSL |
| | | | | TYIYYADSVRG | GPSNRATGIP | SSSLGTQTYICNVNHKPSNTKVDKKVEPKSCDKTHTCP | PLTFGGGTKVEIKRTVAAP |
| | | | | RFTISRDNAKT | DRFSASGSGT | PCPAPELLGGPSVFLFPPKPKDTLMISRTPEVTCVVVD | SVFIFPPSDEQLKSGTASV |
| | | | | SLYLQMNSLRA | DFTLTNSRLE | VSHEDPEVKFNWYVDGVEVHNAKTKPREEQYNSTYRVV | VCLLNNFYPREAKVQWKVD |
| | | | | EDTAMYFCARD | PEDFAVYYCQ | SVLTVLHQDWLNGKEYKCKVSNKALPAPIEKTISKAKG | NALQSGNSQESVTEQDSKD |
| | | | | GETGGFDYWGQ | QYGSLPLTFG | QPREPQVYTLPPSREEMTKNQVSLTCLVKGFYPSDIAV | STYSLSSTLTLSKADYEKH |
| | | | | GILVTVSS | GGTKVEIK | EWESNGQPENNYKTTPPVLDSDGSFFLYSKLTVDKSRW | KVYACEVTHQGLSSPVTKS |
| | | | | | | QQGNVFSCSVMHEALHNHYTQKSLSLSPGK | FNRGEC |
| | | | | 4315 | 4316 | 4317 | 4318 |
| 128 | VG9B125 | IgG1 | Kappa | EVQLVESGGTL | EIVMTQSPAT | EVQLVESGGTLVQPGGSLRLSCAVSGFTFSSYDMNWVR | EIVMTQSPATLSLSPGERA |
| | | | | VQPGGSLRLSC | LSLSPGERAI | QAPGKGLEWVSYISSSSTAKYYADSVKGRFTISRDNAK | ILSCRASQSVSKDLAWYQQ |
| | | | | AVSGFTFSSYD | LSCRASQSVS | NSLYLQMNSLWDEDTAVYYCAREDIVVVTPILQHWGQG | KPGQAPRLLIYDASNRATG |
| | | | | MNWVRQAPGKG | KDLAWYQQKP | TTVTVSSASTKGPSVFPLAPSSKSTSGGTAALGCLVKD | IPARISGSGSGTDFTLTIS |
| | | | | LEWVSYISSSS | GQAPRLLIYD | YFPEPVTVSWNSGALTSGVHTFPAVLQSSGLYSLSSW | SLEPEDFAVYYCQQRINWP |
| | | | | TAKYYADSVKG | ASNRATGIPA | TVPSSSLGTQTYICNVNHKPSNTKVDKKVEPKSCDKTH | LFTFGPGTKVEIKRTVAAP |
| | | | | RFTISRDNAKN | RISGSGSGTD | TCPPCPAPELLGGPSVFLFPPKPKDTLMISRTPEVTCV | SVFIFPPSDEQLKSGTASV |
| | | | | SLYLQMNSLWD | FTLTISSLEP | VVDVSHEDPEVKFNWYVDGVEVHNAKTKPREEQYNSTY | VCLLNNFYPREAKVQWKVD |
| | | | | EDTAVYYCARE | EDFAVYYCQQ | RVVSVLTVLHQDWLNGKEYKCKVSNKALPAPIEKTISK | NALQSGNSQESVTEQDSKD |
| | | | | DIVVVTPILQH | RINWPLFTFG | AKGQPREPQVYTLPPSREEMTKNQVSLTCLVKGFYPSD | STYSLSSTLTLSKADYEKH |
| | | | | WGQGTTVTVSS | PGTKVEIK | IAVEWESNGQPENNYKTTPPVLDSDGSFFLYSKLTVDK | KVYACEVTHQGLSSPVTKS |
| | | | | | | SRWQQGNVFSCSVMHEALHNHYTQKSLSLSPGK | FNRGEC |
| | | | | 4349 | 4350 | 4351 | 4352 |
| 129 | VG9B112 | IgG1 | Kappa | QVQLQQSGPGL | DIQMTQSPSF | QVQLQQSGPGLVKPSQTLSLTCAISGDSVSSNSAAWNW | DIQMTQSPSFLSASVGDRV |
| | | | | VKPSQTLSLTC | LSASVGDRVI | IRQSPSRGLEWLGGTYYRSKWFNNYAVSVKSRITINPD | IITCRASQGIHSYLAWYQQ |
| | | | | AISGDSVSSNS | ITCRASQGIH | TSTNQFSLQLNSVTPADTAVYYCARGEWGLRDAFDIWG | KPGKVPKLLIYVASTLQSG |
| | | | | AAWNWIRQSPS | SYLAWYQQKP | QGTMVTVSSASTKGPSVFPLAPSSKSTSGGTAALGCLV | VPSRFSGSGSGTEFTLTIS |
| | | | | RGLEWLGGTYY | GKVPKLLIYV | KDYFPEPVTVSWNSGALTSGVHTFPAVLQSSGLYSLSS | SLQPEDFATYYCQQLNSYP |
| | | | | RSKWFNNYAVS | ASTLQSGVPS | VVTVPSSSLGTQTYICNVNHKPSNTKVDKKVEPKSCDK | WTFGQGTKLEIKRTVAAPS |
| | | | | VKSRITINPDT | RFSGSGSGTE | THTCPPCPAPELLGGPSVFLFPPKPKDTLMISRTPEVT | VFIFPPSDEQLKSGTASVV |
| | | | | STNQFSLQLNS | FTLTISSLQP | CVVVDVSHEDPEVKFNWYVDGVEVHNAKTKPREEQYNS | CLLNNFYPREAKVQWKVDN |
| | | | | VTPADTAVYYC | EDFATYYCQQ | TYRVVSVLTVLHQDWLNGKEYKCKVSNKALPAPIEKTI | ALQSGNSQESVTEQDSKDS |
| | | | | ARGEWGLRDAF | LNSYPWTFGQ | SKAKGQPREPQVYTLPPSREEMTKNQVSLTCLVKGFYP | TYSLSSTLTLSKADYEKHK |
| | | | | DIWGQGTMVTV | GTKLEIK | SDIAVEWESNGQPENNYKTTPPVLDSDGSFFLYSKLTV | VYACEVTHQGLSSPVTKSF |
| | | | | SS | | DKSRWQQGNVFSCSVMHEALHNHYTQKSLSLSPGK | NRGEC |
| | | | | 4383 | 4384 | 4385 | 4386 |
| 130 | VG9B371 | IgG1 | Kappa | EVQLLESGGGL | EIVMTQSPGT | EVQLLESGGGLVKPGGSLRLSCAASRFTLSSYDMNWVR | EIVMTQSPGTLSLSPGERA |
| | | | | VKPGGSLRLSC | LSLSPGERAT | QAPGKGLEWVSSISSSSSYIYYADSVKGRFTISRDNAK | TLSCRASQSVSSSYLAWYQ |
| | | | | AASRFTLSSYD | LSCRASQSVS | NSLYLQMNSLRAEDTAVYYCARDRGVGGTDYYYYGLDV | QKPGQAPRLLIYGASSRAT |
| | | | | MNWVRQAPGKG | SSYLAWYQQK | WGQGTTVTVSSASTKGPSVFPLAPSSKSTSGGTAALGC | GIPDRFSGSGSGTDFTLTI |
| | | | | LEWVSSISSSS | PGQAPRLLIY | LVKDYFPEPVTVSWNSGALTSGVHTFPAVLQSSGLYSL | SRLEPEDFAVYYCQQYGSS |
| | | | | SYIYYADSVKG | GASSRATGIP | SSVVTVPSSSLGTQTYICNVNHKPSNTKVDKKVEPKSC | PPYTFGQGTKVEIKRTVAA |
| | | | | RFTISRDNAKN | DRFSGSGSGT | DKTHTCPPCPAPELLGGPSVFLFPPKPKDTLMISRTPE | PSVFIFPPSDEQLKSGTAS |
| | | | | SLYLQMNSLRA | DFTLTISRLE | VTCVVVDVSHEDPEVKFNWYVDGVEVHNAKTKPREEQY | VVCLLNNFYPREAKVQWKV |
| | | | | EDTAVYYCARD | PEDFAVYYCQ | NSTYRVVSVLTVLHQDWLNGKEYKCKVSNKALPAPIEK | DNALQSGNSQESVTEQDSK |
| | | | | RGVGGTDYYYY | QYGSSPPYTF | TISKAKGQPREPQVYTLPPSREEMTKNQVSLTCLVKGF | DSTYSLSSTLTLSKADYEK |
| | | | | GLDVWGQGTTV | GQGTKVEIK | YPSDIAVEWESNGQPENNYKTTPPVLDSDGSFFLYSKL | HKVYACEVTHQGLSSPVTK |
| | | | | TVSS | | TVDKSRWQQGNVFSCSVMHEALHNHYTQKSLSLSPGK | SFNRGEC |
| | | | | 4417 | 4418 | 4419 | 4420 |
| 131 | VG9B387 | IgG1 | Lambda | EVQLVESGAEV | SYELTQDPAV | EVQLVESGAEVKKPGASVKVSCKASGFTFTGYYLQWVR | SYELTQDPAVSVALGQTVR |
| | | | | KKPGASVKVSC | SVALGQTVRI | QAPGQGLEWMGWINPNSGYTDYAQRFQDRVTMTRDTSI | ITCQGDSLRNYYAIWYQQK |
| | | | | KASGFTFTGYY | TCQGDSLRNY | NTAYMELSRLRSDDTAVYYCARLDDAFDVWGQGTMVTV | PGQAPVLVIFGKNNRPSGI |
| | | | | LQWVRQAPGQG | YAIWYQQKPG | SSASTKGPSVFPLAPSSKSTSGGTAALGCLVKDYFPEP | PDRFSGSSSGTTASLTITG |
| | | | | LEWMGWINPNS | QAPVLVIFGK | VTVSWNSGALTSGVHTFPAVLQSSGLYSLSSVVTVPSS | TQAEDEADYYCNSRDSSGN |
| | | | | GYTDYAQRFQD | NNRPSGIPDR | SLGTQTYICNVNHKPSNTKVDKKVEPKSCDKTHTCPPC | HWVFGGGTKLTVLGQPKAA |
| | | | | RVTMTRDTSIN | FSGSSSGTTA | PAPELLGGPSVFLFPPKPKDTLMISRTPEVTCVVVDVS | PSVTLFPPSSEELQANKAT |
| | | | | TAYMELSRLRS | SLTITGTQAE | HEDPEVKFNWYVDGVEVHNAKTKPREEQYNSTYRVVSV | LVCLISDFYPGAVTVAWKA |
| | | | | DDTAVYYCARL | DEADYYCNSR | LTVLHQDWLNGKEYKCKVSNKALPAPIEKTISKAKGQP | DSSPVKAGVETTTPSKQSN |
| | | | | DDAFDVWGQGT | DSSGNHWVFG | REPQVYTLPPSREEMTKNQVSLTCLVKGFYPSDIAVEW | NKYAASSYLSLTPEQWKSH |
| | | | | MVTVSS | GGTKLTVL | ESNGQPENNYKTTPPVLDSDGSFFLYSKLTVDKSRWQQ | RSYSCQVTHEGSTVEKTVA |
| | | | | | | GNVFSCSVMHEALHNHYTQKSLSLSPGK | PTECS |
| | | | | 4451 | 4452 | 4453 | 4454 |
| 132 | VG9B47 | IgG1 | Kappa | QVQLVQSGAEV | DIVMTQSPLS | QVQLVQSGAEVKKPGSSVKVSCKASGGSFSNYAISWMR | DIVMTQSPLSSPVDLGQPA |
| | | | | KKPGSSVKVSC | SPVDLGQPAS | QAPGQGLEWMGGIIPFFGTPDYAQKFQGRVTITADKST | SISCRSSQSLVHSDGNTYL |
| | | | | KASGGSFSNYA | ISCRSSQSLV | STAYMELSSLRSEDTAVYYCSTGGGYGDYDYYYGINVW | SWLQQRPGQPPRLLIYKIS |
| | | | | ISWMRQAPGQG | HSDGNTYLSW | GQGTMVTVSSASTKGPSVFPLAPSSKSTSGGTAALGCL | NRFSGVPDRFSGSGAGTDF |
| | | | | LEWMGGIIPFF | LQQRPGQPPR | VKDYFPEPVTVSWNSGALTSGVHTFPAVLQSSGLYSLS | TLKISRVEAEDVGVYYCMQ |
| | | | | GTPDYAQKFQG | LLIYKISNRF | SVVTVPSSSLGTQTYICNVNHKPSNTKVDKKVEPKSCD | AKEFPLTLGGGTKVDIKRT |
| | | | | RVTITADKSTS | SGVPDRFSGS | KTHTCPPCPAPELLGGPSVFLFPPKPKDTLMISRTPEV | VAAPSVFIFPPSDEQLKSG |
| | | | | TAYMELSSLRS | GAGTDFTLKI | TCVVVDVSHEDPEVKFNWYVDGVEVHNAKTKPREEQYN | TASVVCLLNNFYPREAKVQ |
| | | | | EDTAVYYCSTG | SRVEAEDVGV | STYRVVSVLTVLHQDWLNGKEYKCKVSNKALPAPIEKT | WKVDNALQSGNSQESVTEQ |
| | | | | GGYGDYDYYYG | YYCMQAKEFP | ISKAKGQPREPQVYTLPPSREEMTKNQVSLTCLVKGFY | DSKDSTYSLSSTLTLSKAD |
| | | | | INVWGQGTMVT | LTLGGGTKVD | PSDIAVEWESNGQPENNYKTTPPVLDSDGSFFLYSKLT | YEKHKVYACEVTHQGLSSP |
| | | | | VSS | IK | VDKSRWQQGNVFSCSVMHEALHNHYTQKSLSLSPGK | VTKSFNRGEC |
| | | | | 4485 | 4486 | 4487 | 4488 |
| 133 | VG9B379 | IgG1 | Lambda | EVQLVQSGPEV | SSELTQDPAV | EVQLVQSGPEVKKPGASVKVSCKASGYTFTGDYIHWVR | SSELTQDPAVSVALGQTVR |
| | | | | KKPGASVKVSC | SVALGQTVRI | QVPGQGLEWMGWINPNSGGTNYAQKFQGRVTMTRDTSI | ITCQGDSLRSYYARWYQQK |
| | | | | KASGYTFTGDY | TCQGDSLRSY | STAFMELSRLRSDDTAVYYCAREGGVAPAAPDAFDIWG | PGQAPVVVIYGKNNRPSGI |
| | | | | IHWVRQVPGQG | YARWYQQKPG | QGTMVTVSSASTKGPSVFPLAPSSKSTSGGTAALGCLV | PDRFSGSSSGNTASLTITG |
| | | | | LEWMGWINPNS | QAPVVVIYGK | KDYFPEPVTVSWNSGALTSGVHTFPAVLQSSGLYSLSS | AQAEDEADYYCNSRDSSGN |
| | | | | GGTNYAQKFQG | NNRPSGIPDR | VVTVPSSSLGTQTYICNVNHKPSNTKVDKKVEPKSCDK | HRVFGGGTKLTVLGQPKAA |
| | | | | RVTMTRDTSIS | FSGSSSGNTA | THTCPPCPAPELLGGPSVFLFPPKPKDTLMISRTPEVT | PSVTLFPPSSEELQANKAT |
| | | | | TAFMELSRLRS | SLTITGAQAE | CVVVDVSHEDPEVKFNWYVDGVEVHNAKTKPREEQYNS | LVCLISDFYPGAVTVAWKA |
| | | | | DDTAVYYCARE | DEADYYCNSR | TYRVVSVLTVLHQDWLNGKEYKCKVSNKALPAPIEKTI | DSSPVKAGVETTTPSKQSN |
| | | | | GGVAPAAPDAF | DSSGNHRVFG | SKAKGQPREPQVYTLPPSREEMTKNQVSLTCLVKGFYP | NKYAASSYLSLTPEQWKSH |
| | | | | DIWGQGTMVTV | GGTKLTVL | SDIAVEWESNGQPENNYKTTPPVLDSDGSFFLYSKLTV | RSYSCQVTHEGSTVEKTVA |
| | | | | SS | | DKSRWQQGNVFSCSVMHEALHNHYTQKSLSLSPGK | PTECS |
| | | | | 4519 | 4520 | 4521 | 4522 |
| 134 | VG9B447 | IgG1 | Lambda | QVQLQESGPGL | SYELTQPASV | QVQLQESGPGLVKPSETLSLTCTVSGGSISNYYWSWIR | SYELTQPASVSGSPGQSIT |
| | | | | VKPSETLSLTC | SGSPGQSITI | QPAGKGLGWIGRIYSSGITNYNPSLKSRVTMSVDTSKN | ISCTGTSSDVGGYNYVSWY |
| | | | | TVSGGSISNYY | SCTGTSSDVG | QLSLKLSSVTAADTAVYYCAGIVGVKGAFAIWGQGTMV | QQHPGKAPKLMIYEVSNRP |
| | | | | WSWIRQPAGKG | GYNYVSWYQQ | TVSSASTKGPSVFPLAPSSKSTSGGTAALGCLVKDYFP | SGVSNRFSGSKSGNTASLT |
| | | | | LGWIGRIYSSG | HPGKAPKLMI | EPVTVSWNSGALTSGVHTFPAVLQSSGLYSLSSVVTVP | ISGLQAEDEADYYCSSYTS |
| | | | | ITNYNPSLKSR | YEVSNRPSGV | SSSLGTQTYICNVNHKPSNTKVDKKVEPKSCDKTHTCP | TSVVFGGGTKLTVLGQPKA |
| | | | | VTMSVDTSKNQ | SNRFSGSKSG | PCPAPELLGGPSVFLFPPKPKDTLMISRTPEVTCVVVD | APSVTLFPPSSEELQANKA |
| | | | | LSLKLSSVTAA | NTASLTISGL | VSHEDPEVKFNWYVDGVEVHNAKTKPREEQYNSTYRVV | TLVCLISDFYPGAVTVAWK |
| | | | | DTAVYYCAGIV | QAEDEADYYC | SVLTVLHQDWLNGKEYKCKVSNKALPAPIEKTISKAKG | ADSSPVKAGVETTTPSKQS |
| | | | | GVKGAFAIWGQ | SSYTSTSVVF | QPREPQVYTLPPSREEMTKNQVSLTCLVKGFYPSDIAV | NNKYAASSYLSLTPEQWKS |
| | | | | GTMVTVSS | GGGTKLTVL | EWESNGQPENNYKTTPPVLDSDGSFFLYSKLTVDKSRW | HRSYSCQVTHEGSTVEKTV |
| | | | | | | QQGNVFSCSVMHEALHNHYTQKSLSLSPGK | APTECS |
| | | | | 4553 | 4554 | 4555 | 4556 |
| 135 | VG9B392 | IgG1 | Lambda | QVQLVQSGAEV | SSELTQDPAV | QVQLVQSGAEVKRPGASAKVSCKTSGYTFTGYYIHWVR | SSELTQDPAVSVALGQTVR |
| | | | | KRPGASAKVSC | SVALGQTVRI | QAPGQGLEWMGWINPNSGYTNSAQKFQGRVSMTRDTSI | ITCQGDSLRSYYARWYQQK |
| | | | | KTSGYTFTGYY | TCQGDSLRSY | STVYMELSRLRSDDTAVYYCAREDDAFDIWGQGTLVTV | PGQAPVLVIYGKNNRPSGI |
| | | | | IHWVRQAPGQG | YARWYQQKPG | SSASTKGPSVFPLAPSSKSTSGGTAALGCLVKDYFPEP | PDRFSGSSSGDTASLTITG |
| | | | | LEWMGWINPNS | QAPVLVIYGK | VTVSWNSGALTSGVHTFPAVLQSSGLYSLSSVVTVPSS | ALAEDEADYYCNSRDNSGN |
| | | | | GYTNSAQKFQG | NNRPSGIPDR | SLGTQTYICNVNHKPSNTKVDKKVEPKSCDKTHTCPPC | HVVFGGGTKVTVLGQPKAA |
| | | | | RVSMTRDTSIS | FSGSSSGDTA | PAPELLGGPSVFLFPPKPKDTLMISRTPEVTCVVVDVS | PSVTLFPPSSEELQANKAT |
| | | | | TVYMELSRLRS | SLTITGALAE | HEDPEVKFNWYVDGVEVHNAKTKPREEQYNSTYRVVSV | LVCLISDFYPGAVTVAWKA |
| | | | | DDTAVYYCARE | DEADYYCNSR | LTVLHQDWLNGKEYKCKVSNKALPAPIEKTISKAKGQP | DSSPVKAGVETTTPSKQSN |
| | | | | DDAFDIWGQGT | DNSGNHVVFG | REPQVYTLPPSREEMTKNQVSLTCLVKGFYPSDIAVEW | NKYAASSYLSLTPEQWKSH |
| | | | | LVTVSS | GGTKVTVL | ESNGQPENNYKTTPPVLDSDGSFFLYSKLTVDKSRWQQ | RSYSCQVTHEGSTVEKTVA |
| | | | | | | GNVFSCSVMHEALHNHYTQKSLSLSPGK | PTECS |
| | | | | 4587 | 4588 | 4589 | 4590 |
| 136 | VG9B96 | IgG1 | Kappa | EVQLVQSGAEV | DIVMTQSPLS | EVQLVQSGAEVKKPGSSVKVSCKASGGTFSNYAISWVR | DIVMTQSPLSSHVTLGQPA |
| | | | | KKPGSSVKVSC | SHVTLGQPAS | LAPGQGLEWMGGIIPIFSAGTYAQRFQGRVTITADKST | SISCRSSQSLVHSDGNTYL |
| | | | | KASGGTFSNYA | ISCRSSQSLV | STAYMELNSLRSEDTAVYYCSSNSGTYYDYYYGMDVWG | SWLQQRPGQPPRLLIYKIF |
| | | | | ISWVRLAPGQG | HSDGNTYLSW | QGTMVTVSSASTKGPSVFPLAPSSKSTSGGTAALGCLV | NRLSGVPDRFSGSGAGTDF |
| | | | | LEWMGGIIPIF | LQQRPGQPPR | KDYFPEPVTVSWNSGALTSGVHTFPAVLQSSGLYSLSS | TLKISRVEAEDVGVYYCMQ |
| | | | | SAGTYAQRFQG | LLIYKIFNRL | VVTVPSSSLGTQTYICNVNHKPSNTKVDKKVEPKSCDK | AKQFPLTFGGGTKVEIKRT |
| | | | | RVTITADKSTS | SGVPDRFSGS | THTCPPCPAPELLGGPSVFLFPPKPKDTLMISRTPEVT | VAAPSVFIFPPSDEQLKSG |
| | | | | TAYMELNSLRS | GAGTDFTLKI | CVVVDVSHEDPEVKFNWYVDGVEVHNAKTKPREEQYNS | TASVVCLLNNFYPREAKVQ |
| | | | | EDTAVYYCSSN | SRVEAEDVGV | TYRVVSVLTVLHQDWLNGKEYKCKVSNKALPAPIEKTI | WKVDNALQSGNSQESVTEQ |
| | | | | SGTYYDYYYGM | YYCMQAKQFP | SKAKGQPREPQVYTLPPSREEMTKNQVSLTCLVKGFYP | DSKDSTYSLSSTLTLSKAD |
| | | | | DVWGQGTMVTV | LTFGGGTKVE | SDIAVEWESNGQPENNYKTTPPVLDSDGSFFLYSKLTV | YEKHKVYACEVTHQGLSSP |
| | | | | SS | IK | DKSRWQQGNVFSCSVMHEALHNHYTQKSLSLSPGK | VTKSFNRGEC |
| | | | | 4621 | 4622 | 4623 | 4624 |
| 137 | VG9B77 | IgG1 | Kappa | EVQLVESGAEV | EIVMTQSPLF | EVQLVESGAEVMKPGSSVKVSCKASGGTFSSYAISWVR | EIVMTQSPLFSPVTLGQPA |
| | | | | MKPGSSVKVSC | SPVTLGQPAS | QAPEQGLEWMGGIIPFFGTADYAQKFQGRVTITADKST | SISCRSSQSLVHSDGNTYL |
| | | | | KASGGTFSSYA | ISCRSSQSLV | NTAYMELTSLRSEDTAVYYCATATVTTDYYYGMDVWGQ | SWLQQRPGQPPRLLIYEIS |
| | | | | ISWVRQAPEQG | HSDGNTYLSW | GTMVTVSSASTKGPSVFPLAPSSKSTSGGTAALGCLVK | NRFTGVPDRFSGSGAGTDF |
| | | | | LEWMGGIIPFF | LQQRPGQPPR | DYFPEPVTVSWNSGALTSGVHTFPAVLQSSGLYSLSSV | TLKISRVEAEDVGVYYCMQ |
| | | | | GTADYAQKFQG | LLIYEISNRF | VTVPSSSLGTQTYICNVNHKPSNTKVDKKVEPKSCDKT | ARQFPLTFGGGTKVEIKRT |
| | | | | RVTITADKSTN | TGVPDRFSGS | HTCPPCPAPELLGGPSVFLFPPKPKDTLMISRTPEVTC | VAAPSVFIFPPSDEQLKSG |
| | | | | TAYMELTSLRS | GAGTDFTLKI | VVVDVSHEDPEVKFNWYVDGVEVHNAKTKPREEQYNST | TASVVCLLNNFYPREAKVQ |
| | | | | EDTAVYYCATA | SRVEAEDVGV | YRVVSVLTVLHQDWLNGKEYKCKVSNKALPAPIEKTIS | WKVDNALQSGNSQESVTEQ |
| | | | | TVTTDYYYGMD | YYCMQARQFP | KAKGQPREPQVYTLPPSREEMTKNQVSLTCLVKGFYPS | DSKDSTYSLSSTLTLSKAD |
| | | | | VWGQGTMVTVS | LTFGGGTKVE | DIAVEWESNGQPENNYKTTPPVLDSDGSFFLYSKLTVD | YEKHKVYACEVTHQGLSSP |
| | | | | S | IK | KSRWQQGNVFSCSVMHEALHNHYTQKSLSLSPGK | VTKSFNRGEC |
| | | | | 4655 | 4656 | 4657 | 4658 |

TABLE 3
Kabat CDR Amino Acid Sequences

| | Protein | HC Kabat | | | | LC Kabat | LC Kabat |
|---|---|---|---|---|---|---|---|
| # | Name | CDR1 | HC Kabat CDR2 | HC Kabat CDR3 | LC Kabat CDR1 | CDR2 | CDR3 |
| 1 | VG9B54 | SYSLT | SISSSSSYIFYADSVKG | DGELGPFDY | RASQSVSSSYLA | GASSRAT | QQYGRSPLT |
| | | 1 | 2 | 3 | 4 | 5 | 6 |
| 2 | VG9B121 | DYAMD | SISSTSNYIFYADSVKG | SYNWNYGGAFDI | RASQSVSSSYFA | GASSRAT | QQYGRSPLT |
| | | 35 | 36 | 37 | 38 | 39 | 40 |
| 3 | VG9B429 | NYDMN | SISSSSSYIYYADSVKG | DVGVTTDYYYYGMDV | RASQGINSWLA | AASSLQS | QQANSFPWT |
| | | 69 | 70 | 71 | 72 | 73 | 74 |
| 4 | VG9B370 | SYDMN | SISSSSSYIYYADSVKG | DRGVGGTDYYYYGLDV | RASQSVSSSYLA | GASSRAT | QQYGSSPPYT |
| | | 103 | 104 | 105 | 106 | 107 | 108 |
| 5 | VG9B80 | TYSMN | SISSSSSYIFYADSVKG | DGELGVFDY | RASQSISSSYLA | GPSGRAT | QQFGRSPLT |
| | | 137 | 138 | 139 | 140 | 141 | 142 |
| 6 | VG9B414 | NYDMN | SISSSSSYIYYADSVKG | DVGVTTDYYYYGMDV | RASQGINSWLA | AASSLQS | QQANSFPWT |
| | | 171 | 172 | 173 | 174 | 175 | 176 |
| 7 | VG9B195 | PYTMN | SISSSSSYMYYADSVKG | DGDLVGPTYYFDY | SGDKLGDKYAC | QHNKRPS | QAWDSTTVV |
| | | 205 | 206 | 207 | 208 | 209 | 210 |
| 8 | VG9B140 | SYDMN | SISTSSGYIYYADSVKG | DRGIAVAGDYYYGMDV | RASQSVSSSYLA | GASSRAT | QQYGSSPPYT |
| | | 239 | 240 | 241 | 242 | 243 | 244 |
| 9 | VG9B426 | NYDMN | SISSSSSYIYYADSVKG | DVGVTTDYYYYGMDV | RASQSVASSYLA | GASSRAT | QQYGSSPPYT |
| | | 273 | 274 | 275 | 276 | 277 | 278 |
| 10 | VG9B46 | INSMN | SISSTSDYIFNADSVKG | DDVFGAFDI | RTSQSVSRSYLG | GSSSRAT | QQYSRSPLT |
| | | 307 | 308 | 309 | 310 | 311 | 312 |
| 11 | VG9B416 | NYDMN | SISSSSSYIYYADSVKG | DVGVTTDYYYYGMDV | RASQSVASSYLA | GASSRAT | QQYGSSPPYT |
| | | 341 | 342 | 343 | 344 | 345 | 346 |
| 12 | VG9B69 | SYDIN | SITSSSYYIYYADSVKG | DLGVRGVDYYYYGLDV | RASQSVSSSYLA | GASSRAT | QQYGSSPPYT |
| | | 375 | 376 | 377 | 378 | 379 | 380 |
| 13 | VG9B415 | NYDMN | SISSSSSYIYYADSVKG | DVGVTTDYYYYGMDV | RASQSVASSYLA | GASSRAT | QQYGSSPPYT |
| | | 409 | 410 | 411 | 412 | 413 | 414 |
| 14 | VG9B104 | VYSMN | SIGSSSSYIFYADSVKG | DHDYGGLDY | RASQSVSSSYLA | GPSNRAT | QQYGRSPLT |
| | | 443 | 444 | 445 | 446 | 447 | 448 |
| 15 | VG9B198 | SIYWS | RIYTTDITNYNPSLKS | NGYSYGGFNY | TGSSSNIGAGYDVH | GDSYRPS | QSYDSSLSVVV |
| | | 477 | 478 | 479 | 480 | 481 | 482 |
| 16 | VG9B463 | NYDMN | SISSSSSYIYYADSVKG | DVGVTTDYYYYGMDV | SGSSSNIGSNTVN | TNTQRPS | AAWDDSLNAWV |
| | | 511 | 512 | 513 | 514 | 515 | 516 |
| 17 | VG9B469 | HYDMN | SISSSSSYIFYADSVKG | DRGVGDTSDYYSFGLDV | RASQNVSSTYLA | GACSRAT | QQYGSSPPYT |
| | | 545 | 546 | 547 | 548 | 549 | 550 |
| 18 | VG9B428 | NYGMN | YISSGSSYKYYADSMKG | DPVVTEYYYYGMDV | RASQGINSWLA | AASSLQS | QQANSFPWT |
| | | 579 | 580 | 581 | 582 | 583 | 584 |
| 19 | VG9B430 | SYDMN | SISSSSSYIYYADSVKG | DVGVTTDYYYYGMDV | RASQSVASSYLA | GASSRAT | QQYGSSPPYT |
| | | 613 | 614 | 615 | 616 | 617 | 618 |
| 20 | VG9B423 | NYDMN | SISSSSSYIYYADSVKG | DVGVTTDYYYYGMDV | RASQSVASSYLA | GASSRAT | QQYGSSPPYT |
| | | 647 | 648 | 649 | 650 | 651 | 652 |
| 21 | VG9B98 | SYSMY | SIGSSSTYIFYADSVKG | DGELGPFEY | RASQSVSTSYLA | GTSSRAT | LQYGRSPLT |
| | | 681 | 682 | 683 | 684 | 685 | 686 |
| 22 | VG9B73 | NYDMN | SISSSSSYIYYADSVKG | EIGVTGTTYYQDYGMDV | RASQSFSSNYLA | GASSRAT | QQYGSSPPFT |
| | | 715 | 716 | 717 | 718 | 719 | 720 |
| 23 | VG9B133 | NYDMN | SISSSSSYIYYADSVKG | DLGITGTTMDYYYGMDV | RASQSVSSSYLA | GASSRAT | QQYGSSPPYT |
| | | 749 | 750 | 751 | 752 | 753 | 754 |
| 24 | VG9B368 | SYDMN | SISSSSSYIYYADSVKG | DRGIGGDYYSYAMDV | RASQSVSSSYLA | GASSRAT | QQYGSSPPYT |
| | | 783 | 784 | 785 | 786 | 787 | 788 |
| 25 | VG9B424 | NYDMN | SISSSSSYIYYADSVKG | DVGVTTDYYYYGMDV | RASQSVASSYLA | GASSRAT | QQYGSSPPYT |
| | | 817 | 818 | 819 | 820 | 821 | 822 |
| 26 | VG9B427 | NYDMN | SISSSSSYIYYADSVKG | DVGVTTDYYYYGMDV | RASQSVASSYLA | GASSRAT | QQYGSSPPYT |
| | | 851 | 852 | 853 | 854 | 855 | 856 |
| 27 | VG9B417 | NYGMN | YISSGSSYKYYADSMKG | DPVVTEYYYYGMDV | RASQGINSWLA | AASSLQS | QQANSFPWT |
| | | 885 | 886 | 887 | 888 | 889 | 890 |
| 28 | VG9B58 | SSYWT | YMFYLGSTNYNPSLKS | ERPVLDAFDI | RASQDITNYLA | AASSLQG | LQHDTYPYT |
| | | 919 | 920 | 921 | 922 | 923 | 924 |
| 29 | VG9B419 | NYDMN | SISSSSSYIYYADSVKG | DVGVTTDYYYYGMDV | RASQSVASSYLA | GASSRAT | QQYGSSPPYT |
| | | 953 | 954 | 955 | 956 | 957 | 958 |
| 30 | VG9B425 | NYDMN | SISSSSSYIYYADSVKG | DVGVTTDYYYYGMDV | RASQSVASSYLA | GASSRAT | QQYGSSPPYT |
| | | 987 | 988 | 989 | 990 | 991 | 992 |
| 31 | VG9B143 | TYGMN | YISTSSYTIYYSDSVKG | EGDWWYFDL | TGTSSDVGGYNYVS | EVSNRPS | SSYTSSSTLV |
| | | 1021 | 1022 | 1023 | 1024 | 1025 | 1026 |
| 32 | VG9B418 | NYDMN | SISSSSSYIYYADSVKG | DVGVTTDYYYYGMDV | RASQSVASSYLA | GASSRAT | QQYGSSPPYT |
| | | 1055 | 1056 | 1057 | 1058 | 1059 | 1060 |
| 33 | VG9B472 | HYDMN | SISSSSSYIFYADSVKG | DRGVGDTSDYYSFGLDV | RASQGIATYLA | AASTLQS | QKYNSAPPWT |
| | | 1089 | 1090 | 1091 | 1092 | 1093 | 1094 |
| 34 | VG9B421 | NYGMN | YISSGSSYKYYADSMKG | DPVVTEYYYYGMDV | RASQGINSWLA | AASSLQS | QQANSFPWT |
| | | 1123 | 1124 | 1125 | 1126 | 1127 | 1128 |
| 35 | VG9B88 | SYTMN | SISTSSSYIDYADSVKG | DGDMVAPIKGSFDY | RSSQSLLNSDDGNTYLD | TLSYRAS | MQRIEFPIT |
| | | 1157 | 1158 | 1159 | 1160 | 1161 | 1162 |
| 36 | VG9B384 | SSGMCVS | LIDWFDDKYYSTSLKT | IRGTGAYYYGLDV | SGNELGDKYAS | QDNKRPS | QAWDSSKVV |
| | | 1191 | 1192 | 1193 | 1194 | 1195 | 1196 |
| 37 | VG9B413 | NYDMN | SISSSSSYIYYADSVKG | DVGVTTDYYYYGMDV | RASQSVASSYLA | GASSRAT | QQYGSSPPYT |
| | | 1225 | 1226 | 1227 | 1228 | 1229 | 1230 |
| 38 | VG9B36 | SYGMY | SISTGSSYIYYADSVKG | DKGLAVTGYIMDV | QASQDISNYLN | DASNLET | QQYDNLPMYT |
| | | 1259 | 1260 | 1261 | 1262 | 1263 | 1264 |
| 39 | VG9B403 | NYDMN | SISSSSSYIYYADSVKG | DVGVTTDYYYYGMDV | RASQSVASSYLA | GASSRAT | QQYGSSPPYT |
| | | 1293 | 1294 | 1295 | 1296 | 1297 | 1298 |
| 40 | VG9B191 | RYSMN | SISSSSSYIYYADSVKG | DGPTVNWDYYFDL | SGSSSNIGNNYVS | DNNKRPS | GTWDSSLSTSVV |
| | | 1327 | 1328 | 1329 | 1330 | 1331 | 1332 |
| 41 | VG9B44 | SNSAAWN | RTYYRSKWYNDYPISVKS | ESGSYYTDGFDI | RASQGISSYLA | AASTLQS | QEFNSYPYT |
| | | 1361 | 1362 | 1363 | 1364 | 1365 | 1366 |
| 42 | VG9B67 | SYTMN | SISSSSSYIDYAESVKG | DGDILATIRGSFDY | RSSQSLLDSDAGNTYLD | TLSYRAS | MQRIEFPIT |
| | | 1395 | 1396 | 1397 | 1398 | 1399 | 1400 |
| 43 | VG9B402 | NYGMN | YISSGSSYKYYADSMKG | DPVVTEYYYYGMDV | RASQGINSWLA | AASSLQS | QQANSFPWT |
| | | 1429 | 1430 | 1431 | 1432 | 1433 | 1434 |
| 44 | VG9B127 | AYTMN | SISSSSSYIDFAESVKG | DGDIVSTIRGSFDY | RSSQSLLDSDDGNTYLD | TLSYRAS | MQRIEFPIT |
| | | 1463 | 1464 | 1465 | 1466 | 1467 | 1468 |
| 45 | VG9B137 | SYSMD | SIGSSSSYIFYADSVKG | SYSWNYGGAFDI | RASQSVSSSYLA | GASSRAT | QQYGSSPPYT |
| | | 1497 | 1498 | 1499 | 1500 | 1501 | 1502 |
| 46 | VG9B33 | SYNMN | SISTSSSYIYYADSVKG | DTSVTKYPDTFDI | RASQDINNYLA | GASTLQS | QKYNSAPFT |
| | | 1531 | 1532 | 1533 | 1534 | 1535 | 1536 |
| 47 | VG9B162 | GDYMH | WINPNSGYTNYAQKFQG | EGDAFDV | TGTSSDVGGYNYVS | EVSKRPS | NSYAGSNNFEV |
| | | 1565 | 1566 | 1567 | 1568 | 1569 | 1570 |
| 48 | VG9B152 | SYSMI | SISSSSDYIYNADSVKG | DWELLGFDC | SGDKLGDKYAC | QHNKRPS | QAWDSTTVV |
| | | 1599 | 1600 | 1601 | 1602 | 1603 | 1604 |
| 49 | VG9B64 | ISGVSVG | LIYWNDDKRYSPSLQS | SGQWLEGDAFDI | RSSESLVHSDGNTYLS | KISNRFS | MQATQFPLT |
| | | 1633 | 1634 | 1635 | 1636 | 1637 | 1638 |
| 50 | VG9B21 | NYDMN | SISSSSHYIYYADSLKG | DRGVTTDYYYYALDV | RASQGIYNYLA | AASTLQS | QKYNRAPFT |
| | | 1667 | 1668 | 1669 | 1670 | 1671 | 1672 |
| 51 | VG9B128 | TYGMH | VIWYNGSNKYYADSVKG | GGFGESFDS | RASQSVIDYLA | DASNRAT | QQRSNWPLT |
| | | 1701 | 1702 | 1703 | 1704 | 1705 | 1706 |
| 52 | VG9B66 | TYTMN | SISSSSFYMDYADSVKG | DGDIVATIRGSFDY | RASQDITNFLA | TASTLQS | QKYNSAPFT |
| | | 1735 | 1736 | 1737 | 1738 | 1739 | 1740 |
| 53 | VG9B32 | RYAMN | FISGTGYTVYYADSVKG | DQEPGFDY | RSGQSLVHSDGNTYLS | KISSNRFS | MQATHFPFT |
| | | 1769 | 1770 | 1771 | 1772 | 1773 | 1774 |
| 54 | VG9B57 | SHDMN | SISSSSSYIFYADSVKG | DLGVGVRDYYYYGMDV | RASQDCNYLA | AASSLQG | LQHDTYPYT |
| | | 1803 | 1804 | 1805 | 1806 | 1807 | 1808 |
| 55 | VG9B135 | TYGVGVG | LIYWNDDKRYYPSLNN | DYDFWSGYFDY | RASQSVSSSYLA | GASSRAT | QQYGSSPLT |
| | | 1837 | 1838 | 1839 | 1840 | 1841 | 1842 |
| 56 | VG9B60 | GYYMH | RINPNSGVTHYAQKFQG | GGSLVRGVISGLDY | RASQSFSGSYLA | GASSRAT | QQYGSSPPYT |
| | | 1871 | 1872 | 1873 | 1874 | 1875 | 1876 |
| 57 | VG9B409 | SYYMH | IINPSGGSTSYAQKFQG | GSYGWYFDL | RASQSVTSSYLA | GASSRAT | QQYGSSPPYT |
| | | 1905 | 1906 | 1907 | 1908 | 1909 | 1910 |
| 58 | VG9B411 | NYDMN | SISSSSSYIYYADSVKG | DVGVTTDYYYYGMDV | RASQGINSWLA | AASTLQS | QQYNNWPRT |
| | | 1939 | 1940 | 1941 | 1942 | 1943 | 1944 |
| 59 | VG9B129 | SYVIS | GILPILSTANYAQKFQG | AHDYYYGMDV | RASQSVSNNYLA | GASSRAT | QQYGSSPPYT |
| | | 1973 | 1974 | 1975 | 1976 | 1977 | 1978 |
| 60 | VG9B396 | GYYWN | RIFTTGNTNYNPSLKS | EKWDSSSSALYFDF | TGSSSNIGADYDVK | GNTDRPS | QSYDSRLTGYVV |
| | | 2007 | 2008 | 2009 | 2010 | 2011 | 2012 |
| 61 | VG9B470 | TSGVGVG | LILWNDHTIYSPSLKS | DKWELRDAFDI | RASQGISRYLA | VASTLQS | QQLISYPYT |
| | | 2041 | 2042 | 2043 | 2044 | 2045 | 2046 |
| 62 | VG9B111 | TYSVN | SISSDSSYIFYADSMKG | DSVTGPFDY | QASQDISHYLN | DSYILET | QQYDNLPYT |
| | | 2075 | 2076 | 2077 | 2078 | 2079 | 2080 |
| 63 | VG9B169 | NYFWN | YIFYSGSTSYNPSLKS | VGRWELRTAFDI | SGSSSNIGSNTVN | SNNQRPS | AAWDDSLNGPGV |
| | | 2109 | 2110 | 2111 | 2112 | 2113 | 2114 |
| 64 | VG9B639 | TYRMN | SISSSSIYIHSADSVKG | ERVYTVSFDY | QASQDISHYLN | DSYILET | QQYDNLPYT |
| | | 2143 | 2144 | 2145 | 2146 | 2147 | 2148 |
| 65 | VG9B201 | THGVGVG | LIYWNADKHYSPSLKS | EGDWGHYFDF | SGSSSNIGNNDVS | DNNRRPS | ETWDSSLSAIWV |
| | | 2177 | 2178 | 2179 | 2180 | 2181 | 2182 |
| 66 | VG9B161 | SYFWS | YIFYSGSTNYNPSLKS | VGRWELRGAFDI | SGSSSNIGSNTVN | SNNQRPS | AAWDDSLNSPGV |
| | | 2211 | 2212 | 2213 | 2214 | 2215 | 2216 |
| 67 | VG9B383 | SYYWN | RIYTIGNTNYNPSLKS | EGYYDSSGSFFPGAFGI | TGTSNDVGSYNLVS | AGSKRPS | CSFAGATNVV |
| | | 2245 | 2246 | 2247 | 2248 | 2249 | 2250 |
| 68 | VG9B382 | GYYWN | RIFTTGNTNYNPSLKS | ERWDSSSSALYFDY | TGSSSNIGADYDIK | GNSNRPS | QSYDSSMSGYVV |
| | | 2279 | 2280 | 2281 | 2282 | 2283 | 2284 |
| 69 | VG9B156 | GYFWN | YIFYSGSTNYNPSLKS | LGKWELRTAFDI | SGSTSNIGSDTVN | SNNQRPS | AAWDDSLNGPV |
| | | 2313 | 2314 | 2315 | 2316 | 2317 | 2318 |
| 70 | VG9B205 | GYFWN | YIFYSGSTNYNPSLKS | LGKWELRTAFDI | SGDKLGDKYAC | QDSKRPS | QAWDSSTVV |
| | | 2347 | 2348 | 2349 | 2350 | 2351 | 2352 |
| 71 | VG9B86 | SSYWS | RFYSSGSTSYNPSLKS | YSGSYWYFDL | RASQSVSSYLA | DTSNRAT | QQRSDWLLT |
| | | 2381 | 2382 | 2383 | 2384 | 2385 | 2386 |
| 72 | VG9B154 | YYFWN | YIYYSGSTNYNPSLKS | EGKWELRTTFDI | SGSSSNIGSNTVN | SNNQRPS | AAWDDSLNGPV |
| | | 2415 | 2416 | 2417 | 2418 | 2419 | 2420 |
| 73 | VG9B159 | SYYWS | RFYTGGRNNYNPSFKS | DMEYYYDRSGYSYWYFDL | GGNNIGSKSVH | DDSDRPS | QVWDSSSDHVV |
| | | 2449 | 2450 | 2451 | 2452 | 2453 | 2454 |
| 74 | VG9B465 | SYYWN | RIYTIGNTNYNPSLKS | EGYYESDGSFFPGAFNI | TGTSNDVGSYNLVS | AGSKRPS | CSYAGTTNVV |
| | | 2483 | 2484 | 2485 | 2486 | 2487 | 2488 |
| 75 | VG9B194 | GDYMH | WINPNSGYTNNAEKFQG | ELDALDV | TGTSSDVGGYNYVS | EVSKRPS | NSYAGSNNFEV |
| | | 2517 | 2518 | 2519 | 2520 | 2521 | 2522 |
| 76 | VG9B182 | NHFWS | FVFYNGNTNYNPSLKS | VGRWVLRTAFDI | SGSSSNIGSNTVN | SNNQRPS | AAWDDSLNGPGV |
| | | 2551 | 2552 | 2553 | 2554 | 2555 | 2556 |
| 77 | VG9B173 | NYFWS | YIYYSGSTNYNPSLKS | EGKWELRSAFDI | SGSSSNIESNTVN | SNNQRPS | TAWDDSLNGPV |
| | | 2585 | 2586 | 2587 | 2588 | 2589 | 2590 |
| 78 | VG9B87 | SEYIH | IINPSGGSTSYAQRFQG | ERGYSYGSFDY | RASQGISSYLA | AASTLQS | QQFNSYSLT |
| | | 2619 | 2620 | 2621 | 2622 | 2623 | 2624 |
| 79 | VG9B208 | GYYWS | YIFYSGSINYNPSLKN | VGKWELRSSFDI | SGSTSNIGNNDVS | DNNKRPS | GTWDSSLSVWV |
| | | 2653 | 2654 | 2655 | 2656 | 2657 | 2658 |
| 80 | VG9B372 | NGGFYWS | YINYSGSTYYNPSLES | DRNYEWNFDL | RASQSVSSYLA | DASNRAT | QQRSNWPLT |
| | | 2687 | 2688 | 2689 | 2690 | 2691 | 2692 |
| 81 | VG9B186 | NIRMSVS | HIFSNDEKSYNSSLKS | MRLPYGMDV | SGSTSNIGSNTVN | SNNQRPS | AAWDDSLNGPV |
| | | 2721 | 2722 | 2723 | 2724 | 2725 | 2726 |
| 82 | VG9B177 | NYFWS | YIFYSGSTNYNPSLKS | VGKWELRTAFDI | TGTSSDVADYNYVS | EVSNRPS | CSYTSSFTVV |
| | | 2755 | 2756 | 2757 | 2758 | 2759 | 2760 |
| 83 | VG9B114 | RYDMH | AIGSAGDTYYPGSVKG | GKWELRDAFDI | RASQGIHSYLA | VASTLQS | QQLNSYPYT |
| | | 2789 | 2790 | 2791 | 2792 | 2793 | 2794 |
| 84 | VG9B147 | GYFWN | YIFYSGSTNYNPSLKS | EGKWELRSTFDI | QGDSLRSYYAT | GENNRPS | NSRDTGDHHLV |
| | | 2823 | 2824 | 2825 | 2826 | 2827 | 2828 |
| 85 | VG9B65 | IYAIN | GIIPFFGTANYAQKFQD | GGDSGYDWGFDY | RSSQSLVHSDGNTYLS | QISNRFS | MQATQFPLT |
| | | 2857 | 2858 | 2859 | 2860 | 2861 | 2862 |
| 86 | VG9B81 | TYYWS | RIYTSDNTNYNPSLKS | YNWNYWYFDL | RASQGISSYLA | TASTLQS | QHLNSYPYT |
| | | 2891 | 2892 | 2893 | 2894 | 2895 | 2896 |
| 87 | VG9B203 | FTYYWN | RIYTSGSTNYNPSLKS | SGGNFYWYFDL | SGSSSNIGNNYVS | DNNKRPS | GTWDSSLSAGV |
| | | 2925 | 2926 | 2927 | 2928 | 2929 | 2930 |
| 88 | VG9B380 | NYYWS | RIYPSGITSYDPSLKS | IMGTKGAFDI | TGTSSDVGGYNYVS | EVSNRPS | SSYTSTSVV |
| | | 2959 | 2960 | 2961 | 2962 | 2963 | 2964 |
| 89 | VG9B103 | SYAIS | GIIPIFGTATYAQKFQD | GVGWGTDYYYGLDV | RSSQGLVHSDGNTYLS | KISNRFS | MQATHHPLT |
| | | 2993 | 2994 | 2995 | 2996 | 2997 | 2998 |
| 90 | VG9B462 | NYYWS | RIYSSGITNYNPSLKS | IVGVKGAFAI | TGTSSDVGGYNYVS | EVSNRPS | SSYTSTSVV |
| | | 3027 | 3028 | 3029 | 3030 | 3031 | 3032 |
| 91 | VG9B461 | NYYWS | RIYSSGITNYNPSLKS | IVGVKGAFAI | TGTSSDVGGYNYVS | EVSNRPS | SSYTSTSVV |
| | | 3061 | 3062 | 3063 | 3064 | 3065 | 3066 |
| 92 | VG9B106 | GYYLH | WINPSSGDTDYAQTFQG | ELGIGVFDY | KSSQSVLYSSNNKNYLG | WASTRES | QQYYSIPYT |
| | | 3095 | 3096 | 3097 | 3098 | 3099 | 3100 |
| 93 | VG9B115 | TYGVGVG | LIYWNDDKRYNPSLKS | ESDWSYYFDY | RASQSVSSYLA | DASNRAT | QQRSSWPWT |
| | | 3129 | 3130 | 3131 | 3132 | 3133 | 3134 |
| 94 | VG9B27 | SYVIS | GILPILSTANYAQKFQG | AHDYYYGMDV | RSSQSLVHSDGNTYLS | KISNRFS | MQATHHPLT |
| | | 3163 | 3164 | 3165 | 3166 | 3167 | 3168 |
| 95 | VG9B458 | NYYWS | RIYSSGITNYNPSLKS | IVGVKGAFAI | TGTSSDVGGYNYVS | EVSNRPS | SSYTSTSVV |
| | | 3197 | 3198 | 3199 | 3200 | 3201 | 3202 |
| 96 | VG9B131 | SYDMN | YISSSSTAKYYADSVKG | EDIVVVTPILQH | RASQSVSNYLA | DASNRAT | QQRSNWT |
| | | 3231 | 3232 | 3233 | 3234 | 3235 | 3236 |
| 97 | VG9B163 | NHGMS | SITRGGDTTYYPDNVKG | GPLTVGYAMDY | SGNSSNIGHNYVS | DNNQRPS | GIWDSSLSIVV |
| | | 3265 | 3266 | 3267 | 3268 | 3269 | 3270 |
| 98 | VG9B454 | NYYWS | RIYSSGITNYNPSLKS | IVGVKGAFAI | TGTSSDVGGYNYVS | EVSNRPS | SSYTSTSVV |
| | | 3299 | 3300 | 3301 | 3302 | 3303 | 3304 |
| 99 | VG9B439 | NYYWS | RIYSSGITNYNPSLKS | IVGVKGAFAI | TGTSSDVGGYNYVS | EVSNRPS | SSYTSTSVV |
| | | 3333 | 3334 | 3335 | 3336 | 3337 | 3338 |
| 100 | VG9B68 | TYAIS | GIIPIFGTATYAQRFQD | GVGWGSDYYYGLDV | RSSQSLVHSDGNTYLS | KISNRFS | IQATHHPLT |
| | | 3367 | 3368 | 3369 | 3370 | 3371 | 3372 |
| 101 | VG9B449 | NYYWS | RIYSSGITNYNPSLKS | IVGVKGAFAI | TGTSSDVGGYNYVS | EVSNRPS | SSYTSTSVV |
| | | 3401 | 3402 | 3403 | 3404 | 3405 | 3406 |
| 102 | VG9B204 | SFYWS | RIYTSGGTIYNPSLKS | WLRAFDY | SGDKLGDKYAC | QDSKRPS | QAWDSSTVV |
| | | 3435 | 3436 | 3437 | 3438 | 3439 | 3440 |
| 103 | VG9B459 | NYYWS | RIYSSGITNYNPSLKS | IVGVKGAFAI | TGTSSDVGGYNYVS | EVSNRPS | SSYTSTSVV |
| | | 3469 | 3470 | 3471 | 3472 | 3473 | 3474 |
| 104 | VG9B157 | NHGMS | SITRGGDTTYYPDNVKG | GPLTVGYAMDY | QGDSLRSYYAT | GENNRPS | NSRDTGDHHLV |
| | | 3503 | 3504 | 3505 | 3506 | 3507 | 3508 |
| 105 | VG9B453 | NYYWS | RIYSSGITNYNPSLKS | IVGVKGAFAI | TGTSSDVGGYNYVS | EVSNRPS | SSYTSTSVV |
| | | 3537 | 3538 | 3539 | 3540 | 3541 | 3542 |
| 106 | VG9B443 | NYYWS | RIYSSGITNYNPSLKS | IVGVKGAFAI | TGTSSDVGGYNYVS | EVSNRPS | SSYTSTSVV |
| | | 3571 | 3572 | 3573 | 3574 | 3575 | 3576 |
| 107 | VG9B455 | NYYWS | RIYSSGITNYNPSLKS | IVGVKGAFAI | TGTSSDVGGYNYVS | EVSNRPS | SSYTSTSVV |
| | | 3605 | 3606 | 3607 | 3608 | 3609 | 3610 |
| 108 | VG9B466 | NYYWS | RIYSSGITNYNPSLKS | IVGVKGAFAI | TGTSSDVGGYNYVS | EVSNRPS | SSYTSTSVV |
| | | 3639 | 3640 | 3641 | 3642 | 3643 | 3644 |
| 109 | VG9B450 | NYYWS | RIYSSGITNYNPSLKS | IVGVKGAFAI | TGTSSDVGGYNYVS | EVSNRPS | SSYTSTSVV |
| | | 3673 | 3674 | 3675 | 3676 | 3677 | 3678 |
| 110 | VG9B438 | NYYWS | RIYSSGITNYNPSLKS | IVGVKGAFAI | TGTSSDVGGYNYVS | EVSNRPS | SSYTSTSVV |
| | | 3707 | 3708 | 3709 | 3710 | 3711 | 3712 |
| 111 | VG9B464 | NYYWS | RIYSSGITNYNPSLKS | IVGVKGAFAI | TGTSSDVGGYNYVS | EVSNRPS | SSYTSTSVV |
| | | 3741 | 3742 | 3743 | 3744 | 3745 | 3746 |
| 112 | VG9B437 | NYYWS | RIYSSGITNYNPSLKS | IVGVKGAFAI | TGTSSDVGGYNYVS | EVSNRPS | SSYTSTSVV |
| | | 3775 | 3776 | 3777 | 3778 | 3779 | 3780 |
| 113 | VG9B457 | NYYWS | RIYSSGITNYNPSLKS | IVGVKGAFAI | TGTSSDVGGYNYVS | EVSNRPS | SSYTSTSVV |
| | | 3809 | 3810 | 3811 | 3812 | 3813 | 3814 |
| 114 | VG9B442 | NYYWS | RIYSSGITNYNPSLKS | IVGVKGAFAI | TGTSSDVGGYNYVS | EVSNRPS | SSYTSTSVV |
| | | 3843 | 3844 | 3845 | 3846 | 3847 | 3848 |
| 115 | VG9B436 | NYYWS | RIYSSGITNYNPSLKS | IVGVKGAFAI | TGTSSDVGGYNYVS | EVSNRPS | SSYTSTSVV |
| | | 3877 | 3878 | 3879 | 3880 | 3881 | 3882 |
| 116 | VG9B434 | NYYWS | RIYSSGITNYNPSLKS | IVGVKGAFAI | TGTSSDVGGYNYVS | EVSNRPS | SSYTSTSVV |
| | | 3911 | 3912 | 3913 | 3914 | 3915 | 3916 |
| 117 | VG9B460 | NYYWS | RIYSSGITNYNPSLKS | IVGVKGAFAI | TGTSSDVGGYNYVS | EVSNRPS | SSYTSTSVV |
| | | 3945 | 3946 | 3947 | 3948 | 3949 | 3950 |
| 118 | VG9B189 | NHGMS | SITRGGDTTYYPDNVKG | GPLTVGYAMDY | TGTSSDVGGYNYVS | EVSKRPS | NSYAGSNNFEV |
| | | 3979 | 3980 | 3981 | 3982 | 3983 | 3984 |
| 119 | VG9B452 | NYYWS | RIYSSGITNYNPSLKS | IVGVKGAFAI | TGTSSDVGGYNYVS | EVSNRPS | SSYTSTSVV |
| | | 4013 | 4014 | 4015 | 4016 | 4017 | 4018 |
| 120 | VG9B53 | SYYWS | RIHTIGSINYNPSLKS | EGVGATNYYYGMAV | RSSQSLLHSNGYNYLD | LGSNRAS | MQALQTPYT |
| | | 4047 | 4048 | 4049 | 4050 | 4051 | 4052 |
| 121 | VG9B41 | TYWMH | LIDPSDSETRLNQKFKD | NRWLLG | RSSQSLVHSDGNTYLS | KISNRFS | VQTREFPLT |
| | | 4081 | 4082 | 4083 | 4084 | 4085 | 4086 |
| 122 | VG9B136 | SNRAAWN | RTYYRSKWYNEYAASVKS | DLWELREACDI | RASQGISSYLA | VASTLQS | QQLNSYPFT |
| | | 4115 | 4116 | 4117 | 4118 | 4119 | 4120 |
| 123 | VG9B399 | NYDMN | SISSSSSYIYYADSVKG | DVGVTTDYYYYGMDV | RASQSVASSYLA | GASSRAT | QQYGSSPPYT |
| | | 4149 | 4150 | 4151 | 4152 | 4153 | 4154 |
| 124 | VG9B369 | TIGVGVG | LIYWNDDKRYNPSLKS | SHDWVHAFDI | QASQDISHYLN | DASNLDT | QQYDNFPLT |
| | | 4183 | 4184 | 4185 | 4186 | 4187 | 4188 |
| 125 | VG9B144 | GYYMH | WINPNSGATNKEQKFQG | EDDAFDV | QGDNLRNYYAT | GKNNRPS | NSRDSSGNHVV |
| | | 4217 | 4218 | 4219 | 4220 | 4221 | 4222 |
| 126 | VG9B410 | NYGMN | YISSGSSYKYYADSMKG | DPVVTEYYYYGMDV | RASQGINSWLA | AASSLQS | QQANSFPWT |
| | | 4251 | 4252 | 4253 | 4254 | 4255 | 4256 |
| 127 | VG9B386 | SYSMI | SIGSSSTYIYYADSVRG | DGETGGFDY | RASQSISRSYLA | GPSNRAT | QQYGSLPLT |
| | | 4285 | 4286 | 4287 | 4288 | 4289 | 4290 |
| 128 | VG9B125 | SYDMN | YISSSSTAKYYADSVKG | EDIVVVTPILQH | RASQSVSKDLA | DASNRAT | QQRINWPLFT |
| | | 4319 | 4320 | 4321 | 4322 | 4323 | 4324 |
| 129 | VG9B112 | SNSAAWN | GTYYRSKWFNNYAVSVKS | GEWGLRDAFDI | RASQGIHSYLA | VASTLQS | QQLNSYPWT |
| | | 4353 | 4354 | 4355 | 4356 | 4357 | 4358 |
| 130 | VG9B371 | SYDMN | SISSSSSYIYYADSVKG | DRGVGGTDYYYYGLDV | RASQSVSSSYLA | GASSRAT | QQYGSSPPYT |
| | | 4387 | 4388 | 4389 | 4390 | 4391 | 4392 |
| 131 | VG9B387 | GYYLQ | WINPNSGYTDYAQRFQD | LDDAFDV | QGDSLRNYYAI | GKNNRPS | NSRDSSGNHWV |
| | | 4421 | 4422 | 4423 | 4424 | 4425 | 4426 |
| 132 | VG9B47 | NYAIS | GIIPFFGTPDYAQKFQG | GGGYGDYDYYYGINV | RSSQSLVHSDGNTYLS | KISNRFS | MQAKEFPLT |
| | | 4455 | 4456 | 4457 | 4458 | 4459 | 4460 |
| 133 | VG9B379 | GDYIH | WINPNSGGTNYAQKFQG | EGGVAPAAPDAFDI | QGDSLRSYYAR | GKNNRPS | NSRDSSGNHRV |
| | | 4489 | 4490 | 4491 | 4492 | 4493 | 4494 |
| 134 | VG9B447 | NYYWS | RIYSSGITNYNPSLKS | IVGVKGAFAI | TGTSSDVGGYNYVS | EVSNRPS | SSYTSTSVV |
| | | 4523 | 4524 | 4525 | 4526 | 4527 | 4528 |
| 135 | VG9B392 | GYYIH | WINPNSGYTNSAQKFQG | EDDAFDI | QGDSLRSYYAR | GKNNRPS | NSRDNSGNHVV |
| | | 4557 | 4558 | 4559 | 4560 | 4561 | 4562 |
| 136 | VG9B96 | NYAIS | GIIPIFSAGTYAQRFQG | NSGTYYDYYYGMDV | RSSQSLVHSDGNTYLS | KIFNRLS | MQAKQFPLT |
| | | 4591 | 4592 | 4593 | 4594 | 4595 | 4596 |
| 137 | VG9B77 | SYAIS | GIIPFFGTADYAQKFQG | ATVTTDYYYGMDV | RSSQSLVHSDGNTYLS | EISNRFT | MQARQFPLT |
| | | 4625 | 4626 | 4627 | 4628 | 4629 | 4630 |

TABLE 4
Chothia CDR Amino Acid Sequences
(SEQ ID NO disclosed in the cell under each respective sequence)

| | | HC | HC | | | LC | LC |
|---|---|---|---|---|---|---|---|
| | Protein | Chothia | Chothia | HC Chothia | LC Chothia | Chothia | Chothia |
| # | Name | CDR1 | CDR2 | CDR3 | CDR1 | CDR2 | CDR3 |
| 1 | VG9B54 | GFAFSSY | SSSSSY | DGELGPFD | SQSVSSSY | GAS | YGRSPL |
| | | 7 | 8 | 9 | 10 | | 12 |
| 2 | VG9B121 | GFTFSDY | SSTSNY | SYNWNYGGAFD | SQSVSSSY | GAS | YGRSPL |
| | | 41 | 42 | 43 | 44 | | 46 |
| 3 | VG9B429 | GFTFSNY | SSSSSY | DVGVTTDYYYYGMD | SQGINSW | AAS | ANSFPW |
| | | 75 | 76 | 77 | 78 | | 80 |
| 4 | VG9B370 | RFTLSSY | SSSSSY | DRGVGGTDYYYYGLD | SQSVSSSY | GAS | YGSSPPY |
| | | 109 | 110 | 111 | 112 | | 114 |
| 5 | VG9B80 | GFTFSTY | SSSSSY | DGELGVFD | SQSISSSY | GPS | FGRSPL |
| | | 143 | 144 | 145 | 146 | | 148 |
| 6 | VG9B414 | GFTFSNY | SSSSSY | DVGVTTDYYYYGMD | SQGINSW | AAS | ANSFPW |
| | | 177 | 178 | 179 | 180 | | 182 |
| 7 | VG9B195 | GFTFSPY | SSSSSY | DGDLVGPTYYFD | DKLGDKY | QHN | WDSTTV |
| | | 211 | 212 | 213 | 214 | | 216 |
| 8 | VG9B140 | GFTFRSY | STSSGY | DRGIAVAGDYYYGMD | SQSVSSSY | GAS | YGSSPPY |
| | | 245 | 246 | 247 | 248 | | 250 |
| 9 | VG9B426 | GFTFSNY | SSSSSY | DVGVTTDYYYYGMD | SQSVASSY | GAS | YGSSPPY |
| | | 279 | 280 | 281 | 282 | | 284 |
| 10 | VG9B46 | GFTFSIN | SSTSDY | DDVFGAFD | SQSVSRSY | GSS | YSRSPL |
| | | 313 | 314 | 315 | 316 | | 318 |
| 11 | VG9B416 | GFTFSNY | SSSSSY | DVGVTTDYYYYGMD | SQSVASSY | GAS | YGSSPPY |
| | | 347 | 348 | 349 | 350 | | 352 |
| 12 | VG9B69 | GFTFSSY | TSSSYY | DLGVRGVDYYYYGLD | SQSVSSSY | GAS | YGSSPPY |
| | | 381 | 382 | 383 | 384 | | 386 |
| 13 | VG9B415 | GFTFSNY | SSSSSY | DVGVTTDYYYYGMD | SQSVASSY | GAS | YGSSPPY |
| | | 415 | 416 | 417 | 418 | | 420 |
| 14 | VG9B104 | GFTFSVY | GSSSSY | DHDYGGLD | SQSVSSSY | GPS | YGRSPL |
| | | 449 | 450 | 451 | 452 | | 454 |
| 15 | VG9B198 | GDSISSI | YTTDI | NGYSYGGFN | SSSNIGAGYD | GDS | YDSSLSVV |
| | | 483 | 484 | 485 | 486 | | 488 |
| 16 | VG9B463 | GFTFSNY | SSSSSY | DVGVTTDYYYYGMD | SSSNIGSNT | TNT | WDDSLNAW |
| | | 517 | 518 | 519 | 520 | | 522 |
| 17 | VG9B469 | GFTFSHY | SSSSSY | DRGVGDTSDYYSFGLD | SQNVSSTY | GAC | YGSSPPY |
| | | 551 | 552 | 553 | 554 | | 556 |
| 18 | VG9B428 | GFTFSNY | SSGSSY | DPVVTEYYYYGMD | SQGINSW | AAS | ANSFPW |
| | | 585 | 586 | 587 | 588 | | 590 |
| 19 | VG9B430 | GFTFSSY | SSSSSY | DVGVTTDYYYYGMD | SQSVASSY | GAS | YGSSPPY |
| | | 619 | 620 | 621 | 622 | | 624 |
| 20 | VG9B423 | GFTFSNY | SSSSSY | DVGVTTDYYYYGMD | SQSVASSY | GAS | YGSSPPY |
| | | 653 | 654 | 655 | 656 | | 658 |
| 21 | VG9B98 | GFTFSSY | GSSSTY | DGELGPFE | SQSVSTSY | GTS | YGRSPL |
| | | 687 | 688 | 689 | 690 | | 692 |
| 22 | VG9B73 | GFTFSNY | SSSSSY | EIGVTGTTYYQDYGMD | SQSFSSNY | GAS | YGSSPPF |
| | | 721 | 722 | 723 | 724 | | 726 |
| 23 | VG9B133 | GFTFSNY | SSSSSY | DLGITGTTMDYYYGMD | SQSVSSSY | GAS | YGSSPPY |
| | | 755 | 756 | 757 | 758 | | 760 |
| 24 | VG9B368 | GFTFNSY | SSSSSY | DRGIGGDYYSYAMD | SQSVSSSY | GAS | YGSSPPY |
| | | 789 | 790 | 791 | 792 | | 794 |
| 25 | VG9B424 | GFTFSNY | SSSSSY | DVGVTTDYYYYGMD | SQSVASSY | GAS | YGSSPPY |
| | | 823 | 824 | 825 | 826 | | 828 |
| 26 | VG9B427 | GFTFSNY | SSSSSY | DVGVTTDYYYYGMD | SQSVASSY | GAS | YGSSPPY |
| | | 857 | 858 | 859 | 860 | | 862 |
| 27 | VG9B417 | GFTFSNY | SSGSSY | DPVVTEYYYYGMD | SQGINSW | AAS | ANSFPW |
| | | 891 | 892 | 893 | 894 | | 896 |
| 28 | VG9B58 | GGSIKSS | FYLGS | ERPVLDAFD | SQDITNY | AAS | HDTYPY |
| | | 925 | 926 | 927 | 928 | | 930 |
| 29 | VG9B419 | GFTFSNY | SSSSSY | DVGVTTDYYYYGMD | SQSVASSY | GAS | YGSSPPY |
| | | 959 | 960 | 961 | 962 | | 964 |
| 30 | VG9B425 | GFTFSNY | SSSSSY | DVGVTTDYYYYGMD | SQSVASSY | GAS | YGSSPPY |
| | | 993 | 994 | 995 | 996 | | 998 |
| 31 | VG9B143 | GFTFSTY | STSSYT | EGDWWYFD | TSSDVGGYNY | EVS | YTSSSTL |
| | | 1027 | 1028 | 1029 | 1030 | | 1032 |
| 32 | VG9B418 | GFTFSNY | SSSSSY | DVGVTTDYYYYGMD | SQSVASSY | GAS | YGSSPPY |
| | | 1061 | 1062 | 1063 | 1064 | | 1066 |
| 33 | VG9B472 | GFTFSHY | SSSSSY | DRGVGDTSDYYSFGLD | SQGIATY | AAS | YNSAPPW |
| | | 1095 | 1096 | 1097 | 1098 | | 1100 |
| 34 | VG9B421 | GFTFSNY | SSGSSY | DPVVTEYYYYGMD | SQGINSW | AAS | ANSFPW |
| | | 1129 | 1130 | 1131 | 1132 | | 1134 |
| 35 | VG9B88 | GFTFSSY | STSSSY | DGDMVAPIKGSFD | SQSLLNSDDGNTY | TLS | RIEFPI |
| | | 1163 | 1164 | 1165 | 1166 | | 1168 |
| 36 | VG9B384 | GFSLSSSGM | DWFDD | IRGTGAYYYGLD | NELGDKY | QDN | WDSSKV |
| | | 1197 | 1198 | 1199 | 1200 | | 1202 |
| 37 | VG9B413 | GFTFSNY | SSSSSY | DVGVTTDYYYYGMD | SQSVASSY | GAS | YGSSPPY |
| | | 1231 | 1232 | 1233 | 1234 | | 1236 |
| 38 | VG9B36 | GFTFSSY | STGSSY | DKGLAVTGYIMD | SQDISNY | DAS | YDNLPMY |
| | | 1265 | 1266 | 1267 | 1268 | | 1270 |
| 39 | VG9B403 | GFTFSNY | SSSSSY | DVGVTTDYYYYGMD | SQSVASSY | GAS | YGSSPPY |
| | | 1299 | 1300 | 1301 | 1302 | | 1304 |
| 40 | VG9B191 | GFTFSRY | SSSSSY | DGPTVNWDYYFD | SSSNIGNNY | DNN | WDSSLSTSV |
| | | 1333 | 1334 | 1335 | 1336 | | 1338 |
| 41 | VG9B44 | GDSVSSNSA | YYRSKWY | ESGSYYTDGFD | SQGISSY | AAS | FNSYPY |
| | | 1367 | 1368 | 1369 | 1370 | | 1372 |
| 42 | VG9B67 | GFTFSSY | SSSSSY | DGDILATIRGSFD | SQSLLDSDAGNTY | TLS | RIEFPI |
| | | 1401 | 1402 | 1403 | 1404 | | 1406 |
| 43 | VG9B402 | GFTFSNY | SSGSSY | DPVVTEYYYYGMD | SQGINSW | AAS | ANSFPW |
| | | 1435 | 1436 | 1437 | 1438 | | 1440 |
| 44 | VG9B127 | GFTFGAY | SSSSSY | DGDIVSTIRGSFD | SQSLLDSDDGNTY | TLS | RIEFPI |
| | | 1469 | 1470 | 1471 | 1472 | | 1474 |
| 45 | VG9B137 | GITFSSY | GSSSSY | SYSWNYGGAFD | SQSVSSSY | GAS | YGSSPPY |
| | | 1503 | 1504 | 1505 | 1506 | | 1508 |
| 46 | VG9B33 | GFTFSSY | STSSSY | DTSVTKYPDTFD | SQDINNY | GAS | YNSAPF |
| | | 1537 | 1538 | 1539 | 1540 | | 1542 |
| 47 | VG9B162 | GYTFTGD | NPNSGY | EGDAFD | TSSDVGGYNY | EVS | YAGSNNFE |
| | | 1571 | 1572 | 1573 | 1574 | | 1576 |
| 48 | VG9B152 | GFTFSSY | SSSSDY | DWELLGFD | DKLGDKY | QHN | WDSTTV |
| | | 1605 | 1606 | 1607 | 1608 | | 1610 |
| 49 | VG9B64 | GFSLSISGV | YWNDD | SGQWLEGDAFD | SESLVHSDGNTY | KIS | ATQFPL |
| | | 1639 | 1640 | 1641 | 1642 | | 1644 |
| 50 | VG9B21 | GFSFSNY | SSSSHY | DRGVTTDYYYYALD | SQGIYNY | AAS | YNRAPF |
| | | 1673 | 1674 | 1675 | 1676 | | 1678 |
| 51 | VG9B128 | GFTFGTY | WYNGSN | GGFGESFD | SQSVIDY | DAS | RSNWPL |
| | | 1707 | 1708 | 1709 | 1710 | | 1712 |
| 52 | VG9B66 | GFTFSTY | SSSSFY | DGDIVATIRGSFD | SQDITNF | TAS | YNSAPF |
| | | 1741 | 1742 | 1743 | 1744 | | 1746 |
| 53 | VG9B32 | GFTFSRY | SGTGYT | DQEPGFD | GQSLVHSDGNTY | KIS | ATHFPF |
| | | 1775 | 1776 | 1777 | 1778 | | 1780 |
| 54 | VG9B57 | GFTFSSH | SSSSSY | DLGVGVRDYYYYGMD | SQDITNY | AAS | HDTYPY |
| | | 1809 | 1810 | 1811 | 1812 | | 1814 |
| 55 | VG9B135 | GFSLTTYGV | YWNDD | DYDFWSGYFD | SQSVSSSY | GAS | YGSSPL |
| | | 1843 | 1844 | 1845 | 1846 | | 1848 |
| 56 | VG9B60 | GYTFTGY | NPNSGV | GGSLVRGVISGLD | SQSFSGSY | GAS | YGSSPPY |
| | | 1877 | 1878 | 1879 | 1880 | | 1882 |
| 57 | VG9B409 | GYTLTSY | NPSGGS | GSYGWYFD | SQSVTSSY | GAS | YGSSPPY |
| | | 1911 | 1912 | 1913 | 1914 | | 1916 |
| 58 | VG9B411 | GFTFSNY | SSSSSY | DVGVTTDYYYYGMD | SQGINSW | AAS | YNNWPR |
| | | 1945 | 1946 | 1947 | 1948 | | 1950 |
| 59 | VG9B129 | GGTFSSY | LPILST | AHDYYYGMD | SQSVSNNY | GAS | YGSSPPY |
| | | 1979 | 1980 | 1981 | 1982 | | 1984 |
| 60 | VG9B396 | GDSIRGY | FTTGN | EKWDSSSSALYFD | SSSNIGADYD | GNT | YDSRLTGYV |
| | | 2013 | 2014 | 2015 | 2016 | | 2018 |
| 61 | VG9B470 | GFSLTTSGV | LWNDH | DKWELRDAFD | SQGISRY | VAS | LISYPY |
| | | 2047 | 2048 | 2049 | 2050 | | 2052 |
| 62 | VG9B111 | GFTFSTY | SSDSSY | DSVTGPFD | SQDISHY | DSY | YDNLPY |
| | | 2081 | 2082 | 2083 | 2084 | | 2086 |
| 63 | VG9B169 | GGSITNY | FYSGS | VGRWELRTAFD | SSSNIGSNT | SNN | WDDSLNGPG |
| | | 2115 | 2116 | 2117 | 2118 | | 2120 |
| 64 | VG9B639 | GFTFTTY | SSSSIY | ERVYTVSFD | SQDISHY | DSY | YDNLPY |
| | | 2149 | 2150 | 2151 | 2152 | | 2154 |
| 65 | VG9B201 | GFSLTTHGV | YWNAD | EGDWGHYFD | SSSNIGNND | DNN | WDSSLSAIW |
| | | 2183 | 2184 | 2185 | 2186 | | 2188 |
| 66 | VG9B161 | GGSISSY | FYSGS | VGRWELRGAFD | SSSNIGSNT | SNN | WDDSLNSPG |
| | | 2217 | 2218 | 2219 | 2220 | | 2222 |
| 67 | VG9B383 | SGSISSY | YTIGN | EGYYDSSGSFFPGAFG | TSNDVGSYNL | AGS | FAGATNV |
| | | 2251 | 2252 | 2253 | 2254 | | 2256 |
| 68 | VG9B382 | GDSISGY | FTTGN | ERWDSSSSALYFD | SSSNIGADYD | GNS | YDSSMSGYV |
| | | 2285 | 2286 | 2287 | 2288 | | 2290 |
| 69 | VG9B156 | NGSISGY | FYSGS | LGKWELRTAFD | STSNIGSDT | SNN | WDDSLNGP |
| | | 2319 | 2320 | 2321 | 2322 | | 2324 |
| 70 | VG9B205 | NGSISGY | FYSGS | LGKWELRTAFD | DKLGDKY | QDS | WDSSTV |
| | | 2353 | 2354 | 2355 | 2356 | | 2358 |
| 71 | VG9B86 | GDSISSS | YSSGS | YSGSYWYFD | SQSVSSY | DTS | RSDWLL |
| | | 2387 | 2388 | 2389 | 2390 | | 2392 |
| 72 | VG9B154 | GGSISYY | YYSGS | EGKWELRTTFD | SSSNIGSNT | SNN | WDDSLNGP |
| | | 2421 | 2422 | 2423 | 2424 | | 2426 |
| 73 | VG9B159 | GGSISSY | YTGGR | DMEYYYDRSGYSYWYFD | NNIGSKS | DDS | WDSSSDHV |
| | | 2455 | 2456 | 2457 | 2458 | | 2460 |
| 74 | VG9B465 | GGSITSY | YTIGN | EGYYESDGSFFPGAFN | TSNDVGSYNL | AGS | YAGTTNV |
| | | 2489 | 2490 | 2491 | 2492 | | 2494 |
| 75 | VG9B194 | GYTFTGD | NPNSGY | ELDALD | TSSDVGGYNY | EVS | YAGSNNFE |
| | | 2523 | 2524 | 2525 | 2526 | | 2528 |
| 76 | VG9B182 | GDSINNH | FYNGN | VGRWVLRTAFD | SSSNIGSNT | SNN | WDDSLNGPG |
| | | 2557 | 2558 | 2559 | 2560 | | 2562 |
| 77 | VG9B173 | GGSINNY | YYSGS | EGKWELRSAFD | SSSNIESNT | SNN | WDDSLNGP |
| | | 2591 | 2592 | 2593 | 2594 | | 2596 |
| 78 | VG9B87 | GYTFTSE | NPSGGS | ERGYSYGSFD | SQGISSY | AAS | FNSYSL |
| | | 2625 | 2626 | 2627 | 2628 | | 2630 |
| 79 | VG9B208 | GGSISGY | FYSGS | VGKWELRSSFD | STSNIGNND | DNN | WDSSLSVW |
| | | 2659 | 2660 | 2661 | 2662 | | 2664 |
| 80 | VG9B372 | GGSISNGGF | NYSGS | DRNYEWNFD | SQSVSSY | DAS | RSNWPL |
| | | 2693 | 2694 | 2695 | 2696 | | 2698 |
| 81 | VG9B186 | GFSLTNIRM | FSNDE | MRLPYGMD | STSNIGSNT | SNN | WDDSLNGP |
| | | 2727 | 2728 | 2729 | 2730 | | 2732 |
| 82 | VG9B177 | GGSINNY | FYSGS | VGKWELRTAFD | TSSDVADYNY | EVS | YTSSFTV |
| | | 2761 | 2762 | 2763 | 2764 | | 2766 |
| 83 | VG9B114 | GFTFSRY | GSAGD | GKWELRDAFD | SQGIHSY | VAS | LNSYPY |
| | | 2795 | 2796 | 2797 | 2798 | | 2800 |
| 84 | VG9B147 | GGSISGY | FYSGS | EGKWELRSTFD | DSLRSYY | GEN | RDTGDHHL |
| | | 2829 | 2830 | 2831 | 2832 | | 2834 |
| 85 | VG9B65 | GGTFNIY | IPFFGT | GGDSGYDWGFD | SQSLVHSDGNTY | QIS | ATQFPL |
| | | 2863 | 2864 | 2865 | 2866 | | 2868 |
| 86 | VG9B81 | GGSINTY | YTSDN | YNWNYWYFD | SQGISSY | TAS | LNSYPY |
| | | 2897 | 2898 | 2899 | 2900 | | 2902 |
| 87 | VG9B203 | GDSIGHY | YTSGS | SGGNFYWYFD | SSSNIGNNY | DNN | WDSSLSAG |
| | | 2931 | 2932 | 2933 | 2934 | | 2936 |
| 88 | VG9B380 | GGSISNY | YPSGI | IMGTKGAFD | TSSDVGGYNY | EVS | YTSTSV |
| | | 2965 | 2966 | 2967 | 2968 | | 2970 |
| 89 | VG9B103 | GGTFSSY | IPIFGT | GVGWGTDYYYGLD | SQGLVHSDGNTY | KIS | ATHHPL |
| | | 2999 | 3000 | 3001 | 3002 | | 3004 |
| 90 | VG9B462 | GGSISNY | YSSGI | IVGVKGAFA | TSSDVGGYNY | EVS | YTSTSV |
| | | 3033 | 3034 | 3035 | 3036 | | 3038 |
| 91 | VG9B461 | GGSISNY | YSSGI | IVGVKGAFA | TSSDVGGYNY | EVS | YTSTSV |
| | | 3067 | 3068 | 3069 | 3070 | | 3072 |
| 92 | VG9B106 | GYTFTGY | NPSSGD | ELGIGVFD | SQSVLYSSNNKNY | WAS | YYSIPY |
| | | 3101 | 3102 | 3103 | 3104 | | 3106 |
| 93 | VG9B115 | GFSLSTYGV | YWNDD | ESDWSYYFD | SQSVSSY | DAS | RSSWPW |
| | | 3135 | 3136 | 3137 | 3138 | | 3140 |
| 94 | VG9B27 | GGTFSSY | LPILST | AHDYYYGMD | SQSLVHSDGNTY | KIS | ATHHPL |
| | | 3169 | 3170 | 3171 | 3172 | | 3174 |
| 95 | VG9B458 | GGSISNY | YSSGI | IVGVKGAFA | TSSDVGGYNY | EVS | YTSTSV |
| | | 3203 | 3204 | 3205 | 3206 | | 3208 |
| 96 | VG9B131 | GFTFSSY | SSSSTA | EDIVVVTPILQ | SQSVSNY | DAS | RSNW |
| | | 3237 | 3238 | 3239 | 3240 | | 3242 |
| 97 | VG9B163 | GFTFSNH | TRGGDT | GPLTVGYAMD | NSSNIGHNY | DNN | WDSSLSIV |
| | | 3271 | 3272 | 3273 | 3274 | | 3276 |
| 98 | VG9B454 | GGSISNY | YSSGI | IVGVKGAFA | TSSDVGGYNY | EVS | YTSTSV |
| | | 3305 | 3306 | 3307 | 3308 | | 3310 |
| 99 | VG9B439 | GGSISNY | YSSGI | IVGVKGAFA | TSSDVGGYNY | EVS | YTSTSV |
| | | 3339 | 3340 | 3341 | 3342 | | 3344 |
| 100 | VG9B68 | GGTFSTY | IPIFGT | GVGWGSDYYYGLD | SQSLVHSDGNTY | KIS | ATHHPL |
| | | 3373 | 3374 | 3375 | 3376 | | 3378 |
| 101 | VG9B449 | GGSISNY | YSSGI | IVGVKGAFA | TSSDVGGYNY | EVS | YTSTSV |
| | | 3407 | 3408 | 3409 | 3410 | | 3412 |
| 102 | VG9B204 | YGSFSSF | YTSGG | WLRAFD | DKLGDKY | QDS | WDSSTV |
| | | 3441 | 3442 | 3443 | 3444 | | 3446 |
| 103 | VG9B459 | GGSISNY | YSSGI | IVGVKGAFA | TSSDVGGYNY | EVS | YTSTSV |
| | | 3475 | 3476 | 3477 | 3478 | | 3480 |
| 104 | VG9B157 | GFTFSNH | TRGGDT | GPLTVGYAMD | DSLRSYY | GEN | RDTGDHHL |
| | | 3509 | 3510 | 3511 | 3512 | | 3514 |
| 105 | VG9B453 | GGSISNY | YSSGI | IVGVKGAFA | TSSDVGGYNY | EVS | YTSTSV |
| | | 3543 | 3544 | 3545 | 3546 | | 3548 |
| 106 | VG9B443 | GGSISNY | YSSGI | IVGVKGAFA | TSSDVGGYNY | EVS | YTSTSV |
| | | 3577 | 3578 | 3579 | 3580 | | 3582 |
| 107 | VG9B455 | GGSISNY | YSSGI | IVGVKGAFA | TSSDVGGYNY | EVS | YTSTSV |
| | | 3611 | 3612 | 3613 | 3614 | | 3616 |
| 108 | VG9B466 | GGSISNY | YSSGI | IVGVKGAFA | TSSDVGGYNY | EVS | YTSTSV |
| | | 3645 | 3646 | 3647 | 3648 | | 3650 |
| 109 | VG9B450 | GGSISNY | YSSGI | IVGVKGAFA | TSSDVGGYNY | EVS | YTSTSV |
| | | 3679 | 3680 | 3681 | 3682 | | 3684 |
| 110 | VG9B438 | GGSISNY | YSSGI | IVGVKGAFA | TSSDVGGYNY | EVS | YTSTSV |
| | | 3713 | 3714 | 3715 | 3716 | | 3718 |
| 111 | VG9B464 | GGSISNY | YSSGI | IVGVKGAFA | TSSDVGGYNY | EVS | YTSTSV |
| | | 3747 | 3748 | 3749 | 3750 | | 3752 |
| 112 | VG9B437 | GGSISNY | YSSGI | IVGVKGAFA | TSSDVGGYNY | EVS | YTSTSV |
| | | 3781 | 3782 | 3783 | 3784 | | 3786 |
| 113 | VG9B457 | GGSISNY | YSSGI | IVGVKGAFA | TSSDVGGYNY | EVS | YTSTSV |
| | | 3815 | 3816 | 3817 | 3818 | | 3820 |
| 114 | VG9B442 | GGSISNY | YSSGI | IVGVKGAFA | TSSDVGGYNY | EVS | YTSTSV |
| | | 3849 | 3850 | 3851 | 3852 | | 3854 |
| 115 | VG9B436 | GGSISNY | YSSGI | IVGVKGAFA | TSSDVGGYNY | EVS | YTSTSV |
| | | 3883 | 3884 | 3885 | 3886 | | 3888 |
| 116 | VG9B434 | GGSISNY | YSSGI | IVGVKGAFA | TSSDVGGYNY | EVS | YTSTSV |
| | | 3917 | 3918 | 3919 | 3920 | | 3922 |
| 117 | VG9B460 | GGSISNY | YSSGI | IVGVKGAFA | TSSDVGGYNY | EVS | YTSTSV |
| | | 3951 | 3952 | 3953 | 3954 | | 3956 |
| 118 | VG9B189 | GFTFSNH | TRGGDT | GPLTVGYAMD | TSSDVGGYNY | EVS | YAGSNNFE |
| | | 3985 | 3986 | 3987 | 3988 | | 3990 |
| 119 | VG9B452 | GGSISNY | YSSGI | IVGVKGAFA | TSSDVGGYNY | EVS | YTSTSV |
| | | 4019 | 4020 | 4021 | 4022 | | 4024 |
| 120 | VG9B53 | GGSISSY | HTIGS | EGVGATNYYYGMA | SQSLLHSNGYNY | LGS | ALQTPY |
| | | 4053 | 4054 | 4055 | 4056 | | 4058 |
| 121 | VG9B41 | GYSFTTY | DPSDSE | NRWLL | SQSLVHSDGNTY | KIS | TREFPL |
| | | 4087 | 4088 | 4089 | 4090 | | 4092 |
| 122 | VG9B136 | GDSVSSNRA | YYRSKWY | DLWELREACD | SQGISSY | VAS | LNSYPF |
| | | 4121 | 4122 | 4123 | 4124 | | 4126 |
| 123 | VG9B399 | GFTFSNY | SSSSSY | DVGVTTDYYYYGMD | SQSVASSY | GAS | YGSSPPY |
| | | 4155 | 4156 | 4157 | 4158 | | 4160 |
| 124 | VG9B369 | GFSLSTIGV | YWNDD | SHDWVHAFD | SQDISHY | DAS | YDNFPL |
| | | 4189 | 4190 | 4191 | 4192 | | 4194 |
| 125 | VG9B144 | GYTFTGY | NPNSGA | EDDAFD | DNLRNYY | GKN | RDSSGNHV |
| | | 4223 | 4224 | 4225 | 4226 | | 4228 |
| 126 | VG9B410 | GFTFSNY | SSGSSY | DPVVTEYYYYGMD | SQGINSW | AAS | ANSFPW |
| | | 4257 | 4258 | 4259 | 4260 | | 4262 |
| 127 | VG9B386 | GFTFSSY | GSSSTY | DGETGGFD | SQSISRSY | GPS | YGSLPL |
| | | 4291 | 4292 | 4293 | 4294 | | 4296 |
| 128 | VG9B125 | GFTFSSY | SSSSTA | EDIVVVTPILQ | SQSVSKD | DAS | RINWPLF |
| | | 4325 | 4326 | 4327 | 4328 | | 4330 |
| 129 | VG9B112 | GDSVSSNSA | YYRSKWF | GEWGLRDAFD | SQGIHSY | VAS | LNSYPW |
| | | 4359 | 4360 | 4361 | 4362 | | 4364 |
| 130 | VG9B371 | RFTLSSY | SSSSSY | DRGVGGTDYYYYGLD | SQSVSSSY | GAS | YGSSPPY |
| | | 4393 | 4394 | 4395 | 4396 | | 4398 |
| 131 | VG9B387 | GFTFTGY | NPNSGY | LDDAFD | DSLRNYY | GKN | RDSSGNHW |
| | | 4427 | 4428 | 4429 | 4430 | | 4432 |
| 132 | VG9B47 | GGSFSNY | IPFFGT | GGGYGDYDYYYGIN | SQSLVHSDGNTY | KIS | AKEFPL |
| | | 4461 | 4462 | 4463 | 4464 | | 4466 |
| 133 | VG9B379 | GYTFTGD | NPNSGG | EGGVAPAAPDAFD | DSLRSYY | GKN | RDSSGNHR |
| | | 4495 | 4496 | 4497 | 4498 | | 4500 |
| 134 | VG9B447 | GGSISNY | YSSGI | IVGVKGAFA | TSSDVGGYNY | EVS | YTSTSV |
| | | 4529 | 4530 | 4531 | 4532 | | 4534 |
| 135 | VG9B392 | GYTFTGY | NPNSGY | EDDAFD | DSLRSYY | GKN | RDNSGNHV |
| | | 4563 | 4564 | 4565 | 4566 | | 4568 |
| 136 | VG9B96 | GGTFSNY | IPIFSA | NSGTYYDYYYGMD | SQSLVHSDGNTY | KIF | AKQFPL |
| | | 4597 | 4598 | 4599 | 4600 | | 4602 |
| 137 | VG9B77 | GGTFSSY | IPFFGT | ATVTTDYYYGMD | SQSLVHSDGNTY | EIS | ARQFPL |
| | | 4631 | 4632 | 4633 | 4634 | | 4636 |

TABLE 5
AbM CDR Amino Acid Sequences
(SEQ ID NO disclosed in the cell under each respective sequence)

| | Protein | HC AbM | HC AbM | | | LC AbM | LC AbM |
|---|---|---|---|---|---|---|---|
| # | Name | CDR1 | CDR2 | HC AbM CDR3 | LC AbM CDR1 | CDR2 | CDR3 |
| 1 | VG9B54 | GFAFSSYSLT | SISSSSSYIF | DGELGPFDY | RASQSVSSSYLA | GASSRAT | QQYGRSPLT |
| | | 13 | 14 | 15 | 16 | 17 | 18 |
| 2 | VG9B121 | GFTFSDYAMD | SISSTSNYIF | SYNWNYGGAFDI | RASQSVSSSYFA | GASSRAT | QQYGRSPLT |
| | | 47 | 48 | 49 | 50 | 51 | 52 |
| 3 | VG9B429 | GFTFSNYDMN | SISSSSSYIY | DVGVTTDYYYYGMDV | RASQGINSWLA | AASSLQS | QQANSFPWT |
| | | 81 | 82 | 83 | 84 | 85 | 86 |
| 4 | VG9B370 | RFTLSSYDMN | SISSSSSYIY | DRGVGGTDYYYYGLDV | RASQSVSSSYLA | GASSRAT | QQYGSSPPYT |
| | | 115 | 116 | 117 | 118 | 119 | 120 |
| 5 | VG9B80 | GFTFSTYSMN | SISSSSSYIF | DGELGVFDY | RASQSISSSYLA | GPSGRAT | QQFGRSPLT |
| | | 149 | 150 | 151 | 152 | 153 | 154 |
| 6 | VG9B414 | GFTFSNYDMN | SISSSSSYIY | DVGVTTDYYYYGMDV | RASQGINSWLA | AASSLQS | QQANSFPWT |
| | | 183 | 184 | 185 | 186 | 187 | 188 |
| 7 | VG9B195 | GFTFSPYTMN | SISSSSSYMY | DGDLVGPTYYFDY | SGDKLGDKYAC | QHNKRPS | QAWDSTTVV |
| | | 217 | 218 | 219 | 220 | 221 | 222 |
| 8 | VG9B140 | GFTFRSYDMN | SISTSSGYIY | DRGIAVAGDYYYGMDV | RASQSVSSSYLA | GASSRAT | QQYGSSPPYT |
| | | 251 | 252 | 253 | 254 | 255 | 256 |
| 9 | VG9B426 | GFTFSNYDMN | SISSSSSYIY | DVGVTTDYYYYGMDV | RASQSVASSYLA | GASSRAT | QQYGSSPPYT |
| | | 285 | 286 | 287 | 288 | 289 | 290 |
| 10 | VG9B46 | GFTFSINSMN | SISSTSDYIF | DDVFGAFDI | RTSQSVSRSYLG | GSSSRAT | QQYSRSPLT |
| | | 319 | 320 | 321 | 322 | 323 | 324 |
| 11 | VG9B416 | GFTFSNYDMN | SISSSSSYIY | DVGVTTDYYYYGMDV | RASQSVASSYLA | GASSRAT | QQYGSSPPYT |
| | | 353 | 354 | 355 | 356 | 357 | 358 |
| 12 | VG9B69 | GFTFSSYDIN | SITSSSYYIY | DLGVRGVDYYYYGLDV | RASQSVSSSYLA | GASSRAT | QQYGSSPPYT |
| | | 387 | 388 | 389 | 390 | 391 | 392 |
| 13 | VG9B415 | GFTFSNYDMN | SISSSSSYIY | DVGVTTDYYYYGMDV | RASQSVASSYLA | GASSRAT | QQYGSSPPYT |
| | | 421 | 422 | 423 | 424 | 425 | 426 |
| 14 | VG9B104 | GFTFSVYSMN | SIGSSSSYIF | DHDYGGLDY | RASQSVSSSYLA | GPSNRAT | QQYGRSPLT |
| | | 455 | 456 | 457 | 458 | 459 | 460 |
| 15 | VG9B198 | GDSISSIYWS | RIYTTDITN | NGYSYGGFNY | TGSSSNIGAGYDVH | GDSYRPS | QSYDSSLSVVV |
| | | 489 | 490 | 491 | 492 | 493 | 494 |
| 16 | VG9B463 | GFTFSNYDMN | SISSSSSYIY | DVGVTTDYYYYGMDV | SGSSSNIGSNTVN | TNTQRPS | AAWDDSLNAWV |
| | | 523 | 524 | 525 | 526 | 527 | 528 |
| 17 | VG9B469 | GFTFSHYDMN | SISSSSSYIF | DRGVGDTSDYYSFGLDV | RASQNVSSTYLA | GACSRAT | QQYGSSPPYT |
| | | 557 | 558 | 559 | 560 | 561 | 562 |
| 18 | VG9B428 | GFTFSNYGMN | YISSGSSYKY | DPVVTEYYYYGMDV | RASQGINSWLA | AASSLQS | QQANSFPWT |
| | | 591 | 592 | 593 | 594 | 595 | 596 |
| 19 | VG9B430 | GFTFSSYDMN | SISSSSSYIY | DVGVTTDYYYYGMDV | RASQSVASSYLA | GASSRAT | QQYGSSPPYT |
| | | 625 | 626 | 627 | 628 | 629 | 630 |
| 20 | VG9B423 | GFTFSNYDMN | SISSSSSYIY | DVGVTTDYYYYGMDV | RASQSVASSYLA | GASSRAT | QQYGSSPPYT |
| | | 659 | 660 | 661 | 662 | 663 | 664 |
| 21 | VG9B98 | GFTFSSYSMY | SIGSSSTYIF | DGELGPFEY | RASQSVSTSYLA | GTSSRAT | LQYGRSPLT |
| | | 693 | 694 | 695 | 696 | 697 | 698 |
| 22 | VG9B73 | GFTFSNYDMN | SISSSSSYIY | EIGVTGTTYYQDYGMDV | RASQSFSSNYLA | GASSRAT | QQYGSSPPFT |
| | | 727 | 728 | 729 | 730 | 731 | 732 |
| 23 | VG9B133 | GFTFSNYDMN | SISSSSSYIY | DLGITGTTMDYYYGMDV | RASQSVSSSYLA | GASSRAT | QQYGSSPPYT |
| | | 761 | 762 | 763 | 764 | 765 | 766 |
| 24 | VG9B368 | GFTFNSYDMN | SISSSSSYIY | DRGIGGDYYSYAMDV | RASQSVSSSYLA | GASSRAT | QQYGSSPPYT |
| | | 795 | 796 | 797 | 798 | 799 | 800 |
| 25 | VG9B424 | GFTFSNYDMN | SISSSSSYIY | DVGVTTDYYYYGMDV | RASQSVASSYLA | GASSRAT | QQYGSSPPYT |
| | | 829 | 830 | 831 | 832 | 833 | 834 |
| 26 | VG9B427 | GFTFSNYDMN | SISSSSSYIY | DVGVTTDYYYYGMDV | RASQSVASSYLA | GASSRAT | QQYGSSPPYT |
| | | 863 | 864 | 865 | 866 | 867 | 868 |
| 27 | VG9B417 | GFTFSNYGMN | YISSGSSYKY | DPVVTEYYYYGMDV | RASQGINSWLA | AASSLQS | QQANSFPWT |
| | | 897 | 898 | 899 | 900 | 901 | 902 |
| 28 | VG9B58 | GGSIKSSYWT | YMFYLGSTN | ERPVLDAFDI | RASQDITNYLA | AASSLQG | LQHDTYPYT |
| | | 931 | 932 | 933 | 934 | 935 | 936 |
| 29 | VG9B419 | GFTFSNYDMN | SISSSSSYIY | DVGVTTDYYYYGMDV | RASQSVASSYLA | GASSRAT | QQYGSSPPYT |
| | | 965 | 966 | 967 | 968 | 969 | 970 |
| 30 | VG9B425 | GFTFSNYDMN | SISSSSSYIY | DVGVTTDYYYYGMDV | RASQSVASSYLA | GASSRAT | QQYGSSPPYT |
| | | 999 | 1000 | 1001 | 1002 | 1003 | 1004 |
| 31 | VG9B143 | GFTFSTYGMN | YISTSSYTIY | EGDWWYFDL | TGTSSDVGGYNYVS | EVSNRPS | SSYTSSSTLV |
| | | 1033 | 1034 | 1035 | 1036 | 1037 | 1038 |
| 32 | VG9B418 | GFTFSNYDMN | SISSSSSYIY | DVGVTTDYYYYGMDV | RASQSVASSYLA | GASSRAT | QQYGSSPPYT |
| | | 1067 | 1068 | 1069 | 1070 | 1071 | 1072 |
| 33 | VG9B472 | GFTFSHYDMN | SISSSSSYIF | DRGVGDTSDYYSFGLDV | RASQGIATYLA | AASTLQS | QKYNSAPPWT |
| | | 1101 | 1102 | 1103 | 1104 | 1105 | 1106 |
| 34 | VG9B421 | GFTFSNYGMN | YISSGSSYKY | DPVVTEYYYYGMDV | RASQGINSWLA | AASSLQS | QQANSFPWT |
| | | 1135 | 1136 | 1137 | 1138 | 1139 | 1140 |
| 35 | VG9B88 | GFTFSSYTMN | SISTSSSYID | DGDMVAPIKGSFDY | RSSQSLLNSDDGNTYLD | TLSYRAS | MQRIEFPIT |
| | | 1169 | 1170 | 1171 | 1172 | 1173 | 1174 |
| 36 | VG9B384 | GFSLSSSGMCVS | LIDWFDDKY | IRGTGAYYYGLDV | SGNELGDKYAS | QDNKRPS | QAWDSSKVV |
| | | 1203 | 1204 | 1205 | 1206 | 1207 | 1208 |
| 37 | VG9B413 | GFTFSNYDMN | SISSSSSYIY | DVGVTTDYYYYGMDV | RASQSVASSYLA | GASSRAT | QQYGSSPPYT |
| | | 1237 | 1238 | 1239 | 1240 | 1241 | 1242 |
| 38 | VG9B36 | GFTFSSYGMY | SISTGSSYIY | DKGLAVTGYIMDV | QASQDISNYLN | DASNLET | QQYDNLPMYT |
| | | 1271 | 1272 | 1273 | 1274 | 1275 | 1276 |
| 39 | VG9B403 | GFTFSNYDMN | SISSSSSYIY | DVGVTTDYYYYGMDV | RASQSVASSYLA | GASSRAT | QQYGSSPPYT |
| | | 1305 | 1306 | 1307 | 1308 | 1309 | 1310 |
| 40 | VG9B191 | GFTFSRYSMN | SISSSSSYIY | DGPTVNWDYYFDL | SGSSSNIGNNYVS | DNNKRPS | GTWDSSLSTSVV |
| | | 1339 | 1340 | 1341 | 1342 | 1343 | 1344 |
| 41 | VG9B44 | GDSVSSNSAAWN | RTYYRSKWYND | ESGSYYTDGFDI | RASQGISSYLA | AASTLQS | QEFNSYPYT |
| | | 1373 | 1374 | 1375 | 1376 | 1377 | 1378 |
| 42 | VG9B67 | GFTFSSYTMN | SISSSSSYID | DGDILATIRGSFDY | RSSQSLLDSDAGNTYLD | TLSYRAS | MQRIEFPIT |
| | | 1407 | 1408 | 1409 | 1410 | 1411 | 1412 |
| 43 | VG9B402 | GFTFSNYGMN | YISSGSSYKY | DPVVTEYYYYGMDV | RASQGINSWLA | AASSLQS | QQANSFPWT |
| | | 1441 | 1442 | 1443 | 1444 | 1445 | 1446 |
| 44 | VG9B127 | GFTFGAYTMN | SISSSSSYID | DGDIVSTIRGSFDY | RSSQSLLDSDDGNTYLD | TLSYRAS | MQRIEFPIT |
| | | 1475 | 1476 | 1477 | 1478 | 1479 | 1480 |
| 45 | VG9B137 | GITFSSYSMD | SIGSSSSYIF | SYSWNYGGAFDI | RASQSVSSSYLA | GASSRAT | QQYGSSPPYT |
| | | 1509 | 1510 | 1511 | 1512 | 1513 | 1514 |
| 46 | VG9B33 | GFTFSSYNMN | SISTSSSYIY | DTSVTKYPDTFDI | RASQDINNYLA | GASTLQS | QKYNSAPFT |
| | | 1543 | 1544 | 1545 | 1546 | 1547 | 1548 |
| 47 | VG9B162 | GYTFTGDYMH | WINPNSGYTN | EGDAFDV | TGTSSDVGGYNYVS | EVSKRPS | NSYAGSNNFEV |
| | | 1577 | 1578 | 1579 | 1580 | 1581 | 1582 |
| 48 | VG9B152 | GFTFSSYSMI | SISSSSDYIY | DWELLGFDC | SGDKLGDKYAC | QHNKRPS | QAWDSTTVV |
| | | 1611 | 1612 | 1613 | 1614 | 1615 | 1616 |
| 49 | VG9B64 | GFSLSISGVSVG | LIYWNDDKR | SGQWLEGDAFDI | RSSESLVHSDGNTYLS | KISNRFS | MQATQFPLT |
| | | 1645 | 1646 | 1647 | 1648 | 1649 | 1650 |
| 50 | VG9B21 | GFSFSNYDMN | SISSSSHYIY | DRGVTTDYYYYALDV | RASQGIYNYLA | AASTLQS | QKYNRAPFT |
| | | 1679 | 1680 | 1681 | 1682 | 1683 | 1684 |
| 51 | VG9B128 | GFTFGTYGMH | VIWYNGSNKY | GGFGESFDS | RASQSVIDYLA | DASNRAT | QQRSNWPLT |
| | | 1713 | 1714 | 1715 | 1716 | 1717 | 1718 |
| 52 | VG9B66 | GFTFSTYTMN | SISSSSFYMD | DGDIVATIRGSFDY | RASQDITNFLA | TASTLQS | QKYNSAPFT |
| | | 1747 | 1748 | 1749 | 1750 | 1751 | 1752 |
| 53 | VG9B32 | GFTFSRYAMN | FISGTGYTVY | DQEPGFDY | RSGQSLVHSDGNTYLS | KISNRFS | MQATHFPFT |
| | | 1781 | 1782 | 1783 | 1784 | 1785 | 1786 |
| 54 | VG9B57 | GFTFSSHDMN | SISSSSSYIF | DLGVGVRDYYYYGMDV | RASQDITNYLA | AASSLQG | LQHDTYPYT |
| | | 1815 | 1816 | 1817 | 1818 | 1819 | 1820 |
| 55 | VG9B135 | GFSLTTYGVGVG | LIYWNDDKR | DYDFWSGYFDY | RASQSVSSSYLA | GASSRAT | QQYGSSPLT |
| | | 1849 | 1850 | 1851 | 1852 | 1853 | 1854 |
| 56 | VG9B60 | GYTFTGYYMH | RINPNSGVTH | GGSLVRGVISGLDY | RASQSFSGSYLA | GASSRAT | QQYGSSPPYT |
| | | 1883 | 1884 | 1885 | 1886 | 1887 | 1888 |
| 57 | VG9B409 | GYTLTSYYMH | IINPSGGSTS | GSYGWYFDL | RASQSVTSSYLA | GASSRAT | QQYGSSPPYT |
| | | 1917 | 1918 | 1919 | 1920 | 1921 | 1922 |
| 58 | VG9B411 | GFTFSNYDMN | SISSSSSYIY | DVGVTTDYYYYGMDV | RASQGINSWLA | AASTLQS | QQYNNWPRT |
| | | 1951 | 1952 | 1953 | 1954 | 1955 | 1956 |
| 59 | VG9B129 | GGTFSSYVIS | GILPILSTAN | AHDYYYGMDV | RASQSVSNNYLA | GASSRAT | QQYGSSPPYT |
| | | 1985 | 1986 | 1987 | 1988 | 1989 | 1990 |
| 60 | VG9B396 | GDSIRGYYWN | RIFTTGNTN | EKWDSSSSALYFDF | TGSSSNIGADYDVK | GNTDRPS | QSYDSRLTGYVV |
| | | 2019 | 2020 | 2021 | 2022 | 2023 | 2024 |
| 61 | VG9B470 | GFSLTTSGVGVG | LILWNDHTI | DKWELRDAFDI | RASQGISRYLA | VASTLQS | QQLISYPYT |
| | | 2053 | 2054 | 2055 | 2056 | 2057 | 2058 |
| 62 | VG9B111 | GFTFSTYSVN | SISSDSSYIF | DSVTGPFDY | QASQDISHYLN | DSYILET | QQYDNLPYT |
| | | 2087 | 2088 | 2089 | 2090 | 2091 | 2092 |
| 63 | VG9B169 | GGSITNYFWN | YIFYSGSTS | VGRWELRTAFDI | SGSSSNIGSNTVN | SNNQRPS | AAWDDSLNGPGV |
| | | 2121 | 2122 | 2123 | 2124 | 2125 | 2126 |
| 64 | VG9B639 | GFTFTTYRMN | SISSSSIYIH | ERVYTVSFDY | QASQDISHYLN | DSYILET | QQYDNLPYT |
| | | 2155 | 2156 | 2157 | 2158 | 2159 | 2160 |
| 65 | VG9B201 | GFSLTTHGVGVG | LIYWNADKH | EGDWGHYFDF | SGSSSNIGNNDVS | DNNRRPS | ETWDSSLSAIWV |
| | | 2189 | 2190 | 2191 | 2192 | 2193 | 2194 |
| 66 | VG9B161 | GGSISSYFWS | YIFYSGSTN | VGRWELRGAFDI | SGSSSNIGSNTVN | SNNQRPS | AAWDDSLNSPGV |
| | | 2223 | 2224 | 2225 | 2226 | 2227 | 2228 |
| 67 | VG9B383 | SGSISSYYWN | RIYTIGNTN | EGYYDSSGSFFPGAFGI | TGTSNDVGSYNLVS | AGSKRPS | CSFAGATNVV |
| | | 2257 | 2258 | 2259 | 2260 | 2261 | 2262 |
| 68 | VG9B382 | GDSISGYYWN | RIFTTGNTN | ERWDSSSSALYFDY | TGSSSNIGADYDIK | GNSNRPS | QSYDSSMSGYVV |
| | | 2291 | 2292 | 2293 | 2294 | 2295 | 2296 |
| 69 | VG9B156 | NGSISGYFWN | YIFYSGSTN | LGKWELRTAFDI | SGSTSNIGSDTVN | SNNQRPS | AAWDDSLNGPV |
| | | 2325 | 2326 | 2327 | 2328 | 2329 | 2330 |
| 70 | VG9B205 | NGSISGYFWN | YIFYSGSTN | LGKWELRTAFDI | SGDKLGDKYAC | QDSKRPS | QAWDSSTVV |
| | | 2359 | 2360 | 2361 | 2362 | 2363 | 2364 |
| 71 | VG9B86 | GDSISSSYWS | RFYSSGSTS | YSGSYWYFDL | RASQSVSSYLA | DTSNRAT | QQRSDWLLT |
| | | 2393 | 2394 | 2395 | 2396 | 2397 | 2398 |
| 72 | VG9B154 | GGSISYYFWN | YIYYSGSTN | EGKWELRTTFDI | SGSSSNIGSNTVN | SNNQRPS | AAWDDSLNGPV |
| | | 2427 | 2428 | 2429 | 2430 | 2431 | 2432 |
| 73 | VG9B159 | GGSISSYYWS | RFYTGGRNN | DMEYYYDRSGYSYWYFDL | GGNNIGSKSVH | DDSDRPS | QVWDSSSDHVV |
| | | 2461 | 2462 | 2463 | 2464 | 2465 | 2466 |
| 74 | VG9B465 | GGSITSYYWN | RIYTIGNTN | EGYYESDGSFFPGAFNI | TGTSNDVGSYNLVS | AGSKRPS | CSYAGTTNVV |
| | | 2495 | 2496 | 2497 | 2498 | 2499 | 2500 |
| 75 | VG9B194 | GYTFTGDYMH | WINPNSGYTN | ELDALDV | TGTSSDVGGYNYVS | EVSKRPS | NSYAGSNNFEV |
| | | 2529 | 2530 | 2531 | 2532 | 2533 | 2534 |
| 76 | VG9B182 | GDSINNHFWS | FVFYNGNTN | VGRWVLRTAFDI | SGSSSNIGSNTVN | SNNQRPS | AAWDDSLNGPGV |
| | | 2563 | 2564 | 2565 | 2566 | 2567 | 2568 |
| 77 | VG9B173 | GGSINNYFWS | YIYYSGSTN | EGKWELRSAFDI | SGSSSNIESNTVN | SNNQRPS | TAWDDSLNGPV |
| | | 2597 | 2598 | 2599 | 2600 | 2601 | 2602 |
| 78 | VG9B87 | GYTFTSEYIH | IINPSGGSTS | ERGYSYGSFDY | RASQGISSYLA | AASTLQS | QQFNSYSLT |
| | | 2631 | 2632 | 2633 | 2634 | 2635 | 2636 |
| 79 | VG9B208 | GGSISGYYWS | YIFYSGSIN | VGKWELRSSFDI | SGSTSNIGNNDVS | DNNKRPS | GTWDSSLSVWV |
| | | 2665 | 2666 | 2667 | 2668 | 2669 | 2670 |
| 80 | VG9B372 | GGSISNGGFYWS | YINYSGSTY | DRNYEWNFDL | RASQSVSSYLA | DASNRAT | QQRSNWPLT |
| | | 2699 | 2700 | 2701 | 2702 | 2703 | 2704 |
| 81 | VG9B186 | GFSLTNIRMSVS | HIFSNDEKS | MRLPYGMDV | SGSTSNIGSNTVN | SNNQRPS | AAWDDSLNGPV |
| | | 2733 | 2734 | 2735 | 2736 | 2737 | 2738 |
| 82 | VG9B177 | GGSINNYFWS | YIFYSGSTN | VGKWELRTAFDI | TGTSSDVADYNYVS | EVSNRPS | CSYTSSFTVV |
| | | 2767 | 2768 | 2769 | 2770 | 2771 | 2772 |
| 83 | VG9B114 | GFTFSRYDMH | AIGSAGDTY | GKWELRDAFDI | RASQGIHSYLA | VASTLQS | QQLNSYPYT |
| | | 2801 | 2802 | 2803 | 2804 | 2805 | 2806 |
| 84 | VG9B147 | GGSISGYFWN | YIFYSGSTN | EGKWELRSTFDI | QGDSLRSYYAT | GENNRPS | NSRDTGDHHLV |
| | | 2835 | 2836 | 2837 | 2838 | 2839 | 2840 |
| 85 | VG9B65 | GGTFNIYAIN | GIIPFFGTAN | GGDSGYDWGFDY | RSSQSLVHSDGNTYLS | QISNRFS | MQATQFPLT |
| | | 2869 | 2870 | 2871 | 2872 | 2873 | 2874 |
| 86 | VG9B81 | GGSINTYYWS | RIYTSDNTN | YNWNYWYFDL | RASQGISSYLA | TASTLQS | QHLNSYPYT |
| | | 2903 | 2904 | 2905 | 2906 | 2907 | 2908 |
| 87 | VG9B203 | GDSIGHYYWN | RIYTSGSTN | SGGNFYWYFDL | SGSSSNIGNNYVS | DNNKRPS | GTWDSSLSAGV |
| | | 2937 | 2938 | 2939 | 2940 | 2941 | 2942 |
| 88 | VG9B380 | GGSISNYYWS | RIYPSGITS | IMGTKGAFDI | TGTSSDVGGYNYVS | EVSNRPS | SSYTSTSVV |
| | | 2971 | 2972 | 2973 | 2974 | 2975 | 2976 |
| 89 | VG9B103 | GGTFSSYAIS | GIIPIFGTAT | GVGWGTDYYYGLDV | RSSQGLVHSDGNTYLS | KISNRFS | MQATHHPLT |
| | | 3005 | 3006 | 3007 | 3008 | 3009 | 3010 |
| 90 | VG9B462 | GGSISNYYWS | RIYSSGITN | IVGVKGAFAI | TGTSSDVGGYNYVS | EVSNRPS | SSYTSTSVV |
| | | 3039 | 3040 | 3041 | 3042 | 3043 | 3044 |
| 91 | VG9B461 | GGSISNYYWS | RIYSSGITN | IVGVKGAFAI | TGTSSDVGGYNYVS | EVSNRPS | SSYTSTSVV |
| | | 3073 | 3074 | 3075 | 3076 | 3077 | 3078 |
| 92 | VG9B106 | GYTFTGYYLH | WINPSSGDTD | ELGIGVFDY | KSSQSVLYSSNNKNYLG | WASTRES | QQYYSIPYT |
| | | 3107 | 3108 | 3109 | 3110 | 3111 | 3112 |
| 93 | VG9B115 | GFSLSTYGVGVG | LIYWNDDKR | ESDWSYYFDY | RASQSVSSYLA | DASNRAT | QQRSSWPWT |
| | | 3141 | 3142 | 3143 | 3144 | 3145 | 3146 |
| 94 | VG9B27 | GGTFSSYVIS | GILPILSTAN | AHDYYYGMDV | RSSQSLVHSDGNTYLS | KISNRFS | MQATHHPLT |
| | | 3175 | 3176 | 3177 | 3178 | 3179 | 3180 |
| 95 | VG9B458 | GGSISNYYWS | RIYSSGITN | IVGVKGAFAI | TGTSSDVGGYNYVS | EVSNRPS | SSYTSTSVV |
| | | 3209 | 3210 | 3211 | 3212 | 3213 | 3214 |
| 96 | VG9B131 | GFTFSSYDMN | YISSSSTAKY | EDIVVVTPILQH | RASQSVSNYLA | DASNRAT | QQRSNWT |
| | | 3243 | 3244 | 3245 | 3246 | 3247 | 3248 |
| 97 | VG9B163 | GFTFSNHGMS | SITRGGDTTY | GPLTVGYAMDY | SGNSSNIGHNYVS | DNNQRPS | GIWDSSLSIVV |
| | | 3277 | 3278 | 3279 | 3280 | 3281 | 3282 |
| 98 | VG9B454 | GGSISNYYWS | RIYSSGITN | IVGVKGAFAI | TGTSSDVGGYNYVS | EVSNRPS | SSYTSTSVV |
| | | 3311 | 3312 | 3313 | 3314 | 3315 | 3316 |
| 99 | VG9B439 | GGSISNYYWS | RIYSSGITN | IVGVKGAFAI | TGTSSDVGGYNYVS | EVSNRPS | SSYTSTSVV |
| | | 3345 | 3346 | 3347 | 3348 | 3349 | 3350 |
| 100 | VG9B68 | GGTFSTYAIS | GIIPIFGTAT | GVGWGSDYYYGLDV | RSSQSLVHSDGNTYLS | KISNRFS | IQATHHPLT |
| | | 3379 | 3380 | 3381 | 3382 | 3383 | 3384 |
| 101 | VG9B449 | GGSISNYYWS | RIYSSGITN | IVGVKGAFAI | TGTSSDVGGYNYVS | EVSNRPS | SSYTSTSVV |
| | | 3413 | 3414 | 3415 | 3416 | 3417 | 3418 |
| 102 | VG9B204 | YGSFSSFYWS | RIYTSGGTI | WLRAFDY | SGDKLGDKYAC | QDSKRPS | QAWDSSTVV |
| | | 3447 | 3448 | 3449 | 3450 | 3451 | 3452 |
| 103 | VG9B459 | GGSISNYYWS | RIYSSGITN | IVGVKGAFAI | TGTSSDVGGYNYVS | EVSNRPS | SSYTSTSVV |
| | | 3481 | 3482 | 3483 | 3484 | 3485 | 3486 |
| 104 | VG9B157 | GFTFSNHGMS | SITRGGDTTY | GPLTVGYAMDY | QGDSLRSYYAT | GENNRPS | NSRDTGDHHLV |
| | | 3515 | 3516 | 3517 | 3518 | 3519 | 3520 |
| 105 | VG9B453 | GGSISNYYWS | RIYSSGITN | IVGVKGAFAI | TGTSSDVGGYNYVS | EVSNRPS | SSYTSTSVV |
| | | 3549 | 3550 | 3551 | 3552 | 3553 | 3554 |
| 106 | VG9B443 | GGSISNYYWS | RIYSSGITN | IVGVKGAFAI | TGTSSDVGGYNYVS | EVSNRPS | SSYTSTSVV |
| | | 3583 | 3584 | 3585 | 3586 | 3587 | 3588 |
| 107 | VG9B455 | GGSISNYYWS | RIYSSGITN | IVGVKGAFAI | TGTSSDVGGYNYVS | EVSNRPS | SSYTSTSVV |
| | | 3617 | 3618 | 3619 | 3620 | 3621 | 3622 |
| 108 | VG9B466 | GGSISNYYWS | RIYSSGITN | IVGVKGAFAI | TGTSSDVGGYNYVS | EVSNRPS | SSYTSTSVV |
| | | 3651 | 3652 | 3653 | 3654 | 3655 | 3656 |
| 109 | VG9B450 | GGSISNYYWS | RIYSSGITN | IVGVKGAFAI | TGTSSDVGGYNYVS | EVSNRPS | SSYTSTSVV |
| | | 3685 | 3686 | 3687 | 3688 | 3689 | 3690 |
| 110 | VG9B438 | GGSISNYYWS | RIYSSGITN | IVGVKGAFAI | TGTSSDVGGYNYVS | EVSNRPS | SSYTSTSVV |
| | | 3719 | 3720 | 3721 | 3722 | 3723 | 3724 |
| 111 | VG9B464 | GGSISNYYWS | RIYSSGITN | IVGVKGAFAI | TGTSSDVGGYNYVS | EVSNRPS | SSYTSTSVV |
| | | 3753 | 3754 | 3755 | 3756 | 3757 | 3758 |
| 112 | VG9B437 | GGSISNYYWS | RIYSSGITN | IVGVKGAFAI | TGTSSDVGGYNYVS | EVSNRPS | SSYTSTSVV |
| | | 3787 | 3788 | 3789 | 3790 | 3791 | 3792 |
| 113 | VG9B457 | GGSISNYYWS | RIYSSGITN | IVGVKGAFAI | TGTSSDVGGYNYVS | EVSNRPS | SSYTSTSVV |
| | | 3821 | 3822 | 3823 | 3824 | 3825 | 3826 |
| 114 | VG9B442 | GGSISNYYWS | RIYSSGITN | IVGVKGAFAI | TGTSSDVGGYNYVS | EVSNRPS | SSYTSTSVV |
| | | 3855 | 3856 | 3857 | 3858 | 3859 | 3860 |
| 115 | VG9B436 | GGSISNYYWS | RIYSSGITN | IVGVKGAFAI | TGTSSDVGGYNYVS | EVSNRPS | SSYTSTSVV |
| | | 3889 | 3890 | 3891 | 3892 | 3893 | 3894 |
| 116 | VG9B434 | GGSISNYYWS | RIYSSGITN | IVGVKGAFAI | TGTSSDVGGYNYVS | EVSNRPS | SSYTSTSVV |
| | | 3923 | 3924 | 3925 | 3926 | 3927 | 3928 |
| 117 | VG9B460 | GGSISNYYWS | RIYSSGITN | IVGVKGAFAI | TGTSSDVGGYNYVS | EVSNRPS | SSYTSTSVV |
| | | 3957 | 3958 | 3959 | 3960 | 3961 | 3962 |
| 118 | VG9B189 | GFTFSNHGMS | SITRGGDTTY | GPLTVGYAMDY | TGTSSDVGGYNYVS | EVSKRPS | NSYAGSNNFEV |
| | | 3991 | 3992 | 3993 | 3994 | 3995 | 3996 |
| 119 | VG9B452 | GGSISNYYWS | RIYSSGITN | IVGVKGAFAI | TGTSSDVGGYNYVS | EVSNRPS | SSYTSTSVV |
| | | 4025 | 4026 | 4027 | 4028 | 4029 | 4030 |
| 120 | VG9B53 | GGSISSYYWS | RIHTIGSIN | EGVGATNYYYGMAV | RSSQSLLHSNGYNYLD | LGSNRAS | MQALQTPYT |
| | | 4059 | 4060 | 4061 | 4062 | 4063 | 4064 |
| 121 | VG9B41 | GYSFTTYWMH | LIDPSDSETR | NRWLLG | RSSQSLVHSDGNTYLS | KISNRFS | VQTREFPLT |
| | | 4093 | 4094 | 4095 | 4096 | 4097 | 4098 |
| 122 | VG9B136 | GDSVSSNRAAWN | RTYYRSKWYNE | DLWELREACDI | RASQGISSYLA | VASTLQS | QQLNSYPFT |
| | | 4127 | 4128 | 4129 | 4130 | 4131 | 4132 |
| 123 | VG9B399 | GFTFSNYDMN | SISSSSSYIY | DVGVTTDYYYYGMDV | RASQSVASSYLA | GASSRAT | QQYGSSPPYT |
| | | 4161 | 4162 | 4163 | 4164 | 4165 | 4166 |
| 124 | VG9B369 | GFSLSTIGVGVG | LIYWNDDKR | SHDWVHAFDI | QASQDISHYLN | DASNLDT | QQYDNFPLT |
| | | 4195 | 4196 | 4197 | 4198 | 4199 | 4200 |
| 125 | VG9B144 | GYTFTGYYMH | WINPNSGATN | EDDAFDV | QGDNLRNYYAT | GKNNRPS | NSRDSSGNHVV |
| | | 4229 | 4230 | 4231 | 4232 | 4233 | 4234 |
| 126 | VG9B410 | GFTFSNYGMN | YISSGSSYKY | DPVVTEYYYYGMDV | RASQGINSWLA | AASSLQS | QQANSFPWT |
| | | 4263 | 4264 | 4265 | 4266 | 4267 | 4268 |
| 127 | VG9B386 | GFTFSSYSMI | SIGSSSTYIY | DGETGGFDY | RASQSISRSYLA | GPSNRAT | QQYGSLPLT |
| | | 4297 | 4298 | 4299 | 4300 | 4301 | 4302 |
| 128 | VG9B125 | GFTFSSYDMN | YISSSSTAKY | EDIVVVTPILQH | RASQSVSKDLA | DASNRAT | QQRINWPLFT |
| | | 4331 | 4332 | 4333 | 4334 | 4335 | 4336 |
| 129 | VG9B112 | GDSVSSNSAAWN | GTYYRSKWFNN | GEWGLRDAFDI | RASQGIHSYLA | VASTLQS | QQLNSYPWT |
| | | 4365 | 4366 | 4367 | 4368 | 4369 | 4370 |
| 130 | VG9B371 | RFTLSSYDMN | SISSSSSYIY | DRGVGGTDYYYYGLDV | RASQSVSSSYLA | GASSRAT | QQYGSSPPYT |
| | | 4399 | 4400 | 4401 | 4402 | 4403 | 4404 |
| 131 | VG9B387 | GFTFTGYYLQ | WINPNSGYTD | LDDAFDV | QGDSLRNYYAI | GKNNRPS | NSRDSSGNHWV |
| | | 4433 | 4434 | 4435 | 4436 | 4437 | 4438 |
| 132 | VG9B47 | GGSFSNYAIS | GIIPFFGTPD | GGGYGDYDYYYGINV | RSSQSLVHSDGNTYLS | KISNRFS | MQAKEFPLT |
| | | 4467 | 4468 | 4469 | 4470 | 4471 | 4472 |
| 133 | VG9B379 | GYTFTGDYIH | WINPNSGGTN | EGGVAPAAPDAFDI | QGDSLRSYYAR | GKNNRPS | NSRDSSGNHRV |
| | | 4501 | 4502 | 4503 | 4504 | 4505 | 4506 |
| 134 | VG9B447 | GGSISNYYWS | RIYSSGITN | IVGVKGAFAI | TGTSSDVGGYNYVS | EVSNRPS | SSYTSTSVV |
| | | 4535 | 4536 | 4537 | 4538 | 4539 | 4540 |
| 135 | VG9B392 | GYTFTGYYIH | WINPNSGYTN | EDDAFDI | QGDSLRSYYAR | GKNNRPS | NSRDNSGNHVV |
| | | 4569 | 4570 | 4571 | 4572 | 4573 | 4574 |
| 136 | VG9B96 | GGTFSNYAIS | GIIPIFSAGT | NSGTYYDYYYGMDV | RSSQSLVHSDGNTYLS | KIFNRLS | MQAKQFPLT |
| | | 4603 | 4604 | 4605 | 4606 | 4607 | 4608 |
| 137 | VG9B77 | GGTFSSYAIS | GIIPFFGTAD | ATVTTDYYYGMDV | RSSQSLVHSDGNTYLS | EISNRFT | MQARQFPLT |
| | | 4637 | 4638 | 4639 | 4640 | 4641 | 4642 |

TABLE 6
Contact CDR Amino Acid Sequences
(SEQ ID NO disclosed in the cell under each respective sequence)

| | Protein | HC Contact | HC Contact | HC Contact | LC Contact | LC Contact | LC Contact |
|---|---|---|---|---|---|---|---|
| # | Name | CDR1 | CDR2 | CDR3 | CDR1 | CDR2 | CDR3 |
| 1 | VG9B54 | SSYSLT | WVSSISSSSSYIF | ATDGELGPFD | SSSYLAWF | RLIYGASSRA | QQYGRSPL |
| | | 19 | 20 | 21 | 22 | 23 | 24 |
| 2 | VG9B121 | SDYAMD | WISSISSTSNYIF | ANSYNWNYGGAFD | SSSYFAWY | LLIYGASSRA | QQYGRSPL |
| | | 53 | 54 | 55 | 56 | 57 | 58 |
| 3 | VG9B429 | SNYDMN | WVSSISSSSSYIY | ARDVGVTTDYYYYGMD | NSWLAWY | LLIYAASSLQ | QQANSFPW |
| | | 87 | 88 | 89 | 90 | 91 | 92 |
| 4 | VG9B370 | SSYDMN | WVSSISSSSSYIY | ARDRGVGGTDYYYYGLD | SSSYLAWY | LLIYGASSRA | QQYGSSPPY |
| | | 121 | 122 | 123 | 124 | 125 | 126 |
| 5 | VG9B80 | STYSMN | WVSSISSSSSYIF | AKDGELGVFD | SSSYLAWY | VLIYGPSGRA | QQFGRSPL |
| | | 155 | 156 | 157 | 158 | 159 | 160 |
| 6 | VG9B414 | SNYDMN | WVSSISSSSSYIY | ARDVGVTTDYYYYGMD | NSWLAWY | LLIYAASSLQ | QQANSFPW |
| | | 189 | 190 | 191 | 192 | 193 | 194 |
| 7 | VG9B195 | SPYTMN | WVSSISSSSSYMY | ARDGDLVGPTYYFD | DKYACWY | LVIYQHNKRP | QAWDSTTV |
| | | 223 | 224 | 225 | 226 | 227 | 228 |
| 8 | VG9B140 | RSYDMN | WVSSISTSSGYIY | ARDRGIAVAGDYYYGMD | SSSYLAWY | LLIYGASSRA | QQYGSSPPY |
| | | 257 | 258 | 259 | 260 | 261 | 262 |
| 9 | VG9B426 | SNYDMN | WVSSISSSSSYIY | ARDVGVTTDYYYYGMD | ASSYLAWY | LLIYGASSRA | QQYGSSPPY |
| | | 291 | 292 | 293 | 294 | 295 | 296 |
| 10 | VG9B46 | SINSMN | WVSSISSTSDYIF | VRDDVFGAFD | SRSYLGWY | LLIFGSSSRA | QQYSRSPL |
| | | 325 | 326 | 327 | 328 | 329 | 330 |
| 11 | VG9B416 | SNYDMN | WVSSISSSSSYIY | ARDVGVTTDYYYYGMD | ASSYLAWY | LLIYGASSRA | QQYGSSPPY |
| | | 359 | 360 | 361 | 362 | 363 | 364 |
| 12 | VG9B69 | SSYDIN | WVSSITSSSYYIY | ARDLGVRGVDYYYYGLD | SSSYLAWY | LLIYGASSRA | QQYGSSPPY |
| | | 393 | 394 | 395 | 396 | 397 | 398 |
| 13 | VG9B415 | SNYDMN | WVSSISSSSSYIY | ARDVGVTTDYYYYGMD | ASSYLAWY | LLIYGASSRA | QQYGSSPPY |
| | | 427 | 428 | 429 | 430 | 431 | 432 |
| 14 | VG9B104 | SVYSMN | WVSSIGSSSSYIF | GRDHDYGGLD | SSSYLAWY | LLIYGPSNRA | QQYGRSPL |
| | | 461 | 462 | 463 | 464 | 465 | 466 |
| 15 | VG9B198 | SSIYWS | WIGRIYTTDITN | AKNGYSYGGFN | IGAGYDVHWY | LLIYGDSYRP | QSYDSSLSVV |
| | | 495 | 496 | 497 | 498 | 499 | 500 |
| 16 | VG9B463 | SNYDMN | WVSSISSSSSYIY | ARDVGVTTDYYYYGMD | IGSNTVNWY | LLIYTNTQRP | AAWDDSLNAW |
| | | 529 | 530 | 531 | 532 | 533 | 534 |
| 17 | VG9B469 | SHYDMN | WVSSISSSSSYIF | ARDRGVGDTSDYYSFGLD | SSTYLAWY | LLIYGACSRA | QQYGSSPPY |
| | | 563 | 564 | 565 | 566 | 567 | 568 |
| 18 | VG9B428 | SNYGMN | WVSYISSGSSYKY | ARDPVVTEYYYYGMD | NSWLAWY | LLIYAASSLQ | QQANSFPW |
| | | 597 | 598 | 599 | 600 | 601 | 602 |
| 19 | VG9B430 | SSYDMN | WVSSISSSSSYIY | ARDVGVTTDYYYYGMD | ASSYLAWY | LLIYGASSRA | QQYGSSPPY |
| | | 631 | 632 | 633 | 634 | 635 | 636 |
| 20 | VG9B423 | SNYDMN | WVSSISSSSSYIY | ARDVGVTTDYYYYGMD | ASSYLAWY | LLIYGASSRA | QQYGSSPPY |
| | | 665 | 666 | 667 | 668 | 669 | 670 |
| 21 | VG9B98 | SSYSMY | WVSSIGSSSTYIF | ARDGELGPFE | STSYLAWF | LLIFGTSSRA | LQYGRSPL |
| | | 699 | 700 | 701 | 702 | 703 | 704 |
| 22 | VG9B73 | SNYDMN | WVSSISSSSSYIY | AREIGVTGITYYQDYGMD | SSNYLAWY | LLIYGASSRA | QQYGSSPPF |
| | | 733 | 734 | 735 | 736 | 737 | 738 |
| 23 | VG9B133 | SNYDMN | WVSSISSSSSYIY | ARDLGITGTTMDYYYGMD | SSSYLAWY | LLIYGASSRA | QQYGSSPPY |
| | | 767 | 768 | 769 | 770 | 771 | 772 |
| 24 | VG9B368 | NSYDMN | WVSSISSSSSYIY | ARDRGIGGDYYSYAMD | SSSYLAWY | LLIYGASSRA | QQYGSSPPY |
| | | 801 | 802 | 803 | 804 | 805 | 806 |
| 25 | VG9B424 | SNYDMN | WVSSISSSSSYIY | ARDVGVTTDYYYYGMD | ASSYLAWY | LLIYGASSRA | QQYGSSPPY |
| | | 835 | 836 | 837 | 838 | 839 | 840 |
| 26 | VG9B427 | SNYDMN | WVSSISSSSSYIY | ARDVGVTTDYYYYGMD | ASSYLAWY | LLIYGASSRA | QQYGSSPPY |
| | | 869 | 870 | 871 | 872 | 873 | 874 |
| 27 | VG9B417 | SNYGMN | WVSYISSGSSYKY | ARDPVVTEYYYYGMD | NSWLAWY | LLIYAASSLQ | QQANSFPW |
| | | 903 | 904 | 905 | 906 | 907 | 908 |
| 28 | VG9B58 | KSSYWT | WIGYMFYLGSTN | SRERPVLDAFD | TNYLAWF | RLIYAASSLQ | LQHDTYPY |
| | | 937 | 938 | 939 | 940 | 941 | 942 |
| 29 | VG9B419 | SNYDMN | WVSSISSSSSYIY | ARDVGVTTDYYYYGMD | ASSYLAWY | LLIYGASSRA | QQYGSSPPY |
| | | 971 | 972 | 973 | 974 | 975 | 976 |
| 30 | VG9B425 | SNYDMN | WVSSISSSSSYIY | ARDVGVTTDYYYYGMD | ASSYLAWY | LLIYGASSRA | QQYGSSPPY |
| | | 1005 | 1006 | 1007 | 1008 | 1009 | 1010 |
| 31 | VG9B143 | STYGMN | WISYISTSSYTIY | AREGDWWYFD | VGGYNYVSWY | LMIYEVSNRP | SSYTSSSTL |
| | | 1039 | 1040 | 1041 | 1042 | 1043 | 1044 |
| 32 | VG9B418 | SNYDMN | WVSSISSSSSYIY | ARDVGVTTDYYYYGMD | ASSYLAWY | LLIYGASSRA | QQYGSSPPY |
| | | 1073 | 1074 | 1075 | 1076 | 1077 | 1078 |
| 33 | VG9B472 | SHYDMN | WVSSISSSSSYIF | ARDRGVGDTSDYYSFGLD | ATYLAWY | LLIYAASTLQ | QKYNSAPPW |
| | | 1107 | 1108 | 1109 | 1110 | 1111 | 1112 |
| 34 | VG9B421 | SNYGMN | WVSYISSGSSYKY | ARDPVVTEYYYYGMD | NSWLAWY | LLIYAASSLQ | QQANSFPW |
| | | 1141 | 1142 | 1143 | 1144 | 1145 | 1146 |
| 35 | VG9B88 | SSYTMN | WVSSISTSSSYID | ARDGDMVAPIKGSFD | LNSDDGNTYLDWY | LLIYTLSYRA | MQRIEFPI |
| | | 1175 | 1176 | 1177 | 1178 | 1179 | 1180 |
| 36 | VG9B384 | SSSGMCVS | WLTLIDWFDDKY | ARIRGTGAYYYGLD | DKYASWY | LVIYQDNKRP | QAWDSSKV |
| | | 1209 | 1210 | 1211 | 1212 | 1213 | 1214 |
| 37 | VG9B413 | SNYDMN | WVSSISSSSSYIY | ARDVGVTTDYYYYGMD | ASSYLAWY | LLIYGASSRA | QQYGSSPPY |
| | | 1243 | 1244 | 1245 | 1246 | 1247 | 1248 |
| 38 | VG9B36 | SSYGMY | WVSSISTGSSYIY | ARDKGLAVTGYIMD | SNYLNWY | LLIYDASNLE | QQYDNLPMY |
| | | 1277 | 1278 | 1279 | 1280 | 1281 | 1282 |
| 39 | VG9B403 | SNYDMN | WVSSISSSSSYIY | ARDVGVTTDYYYYGMD | ASSYLAWY | LLIYGASSRA | QQYGSSPPY |
| | | 1311 | 1312 | 1313 | 1314 | 1315 | 1316 |
| 40 | VG9B191 | SRYSMN | GVSSISSSSSYIY | ARDGPTVNWDYYFD | IGNNYVSWY | LLIYDNNKRP | GTWDSSLSTSV |
| | | 1345 | 1346 | 1347 | 1348 | 1349 | 1350 |
| 41 | VG9B44 | SSNSAAWN | WLGRTYYRSKWYND | ARESGSYYTDGFD | SSYLAWY | LLIYAASTLQ | QEFNSYPY |
| | | 1379 | 1380 | 1381 | 1382 | 1383 | 1384 |
| 42 | VG9B67 | SSYTMN | WVSSISSSSSYID | ARDGDILATIRGSFD | LDSDAGNTYLDWY | LLIYTLSYRA | MQRIEFPI |
| | | 1413 | 1414 | 1415 | 1416 | 1417 | 1418 |
| 43 | VG9B402 | SNYGMN | WVSYISSGSSYKY | ARDPVVTEYYYYGMD | NSWLAWY | LLIYAASSLQ | QQANSFPW |
| | | 1447 | 1448 | 1449 | 1450 | 1451 | 1452 |
| 44 | VG9B127 | GAYTMN | WVSSISSSSSYID | ARDGDIVSTIRGSFD | LDSDDGNTYLDWY | LLIYTLSYRA | MQRIEFPI |
| | | 1481 | 1482 | 1483 | 1484 | 1485 | 1486 |
| 45 | VG9B137 | SSYSMD | WVSSIGSSSSYIF | ATSYSWNYGGAFD | SSSYLAWY | LLIYGASSRA | QQYGSSPPY |
| | | 1515 | 1516 | 1517 | 1518 | 1519 | 1520 |
| 46 | VG9B33 | SSYNMN | WVSSISTSSSYIY | ARDTSVTKYPDTFD | NNYLAWF | LLIYGASTLQ | QKYNSAPF |
| | | 1549 | 1550 | 1551 | 1552 | 1553 | 1554 |
| 47 | VG9B162 | TGDYMH | WMGWINPNSGYTN | AREGDAFD | VGGYNYVSWY | LMIYEVSKRP | NSYAGSNNFE |
| | | 1583 | 1584 | 1585 | 1586 | 1587 | 1588 |
| 48 | VG9B152 | SSYSMI | WVSSISSSSDYIY | ARDWELLGFD | DKYACWY | LVIYQHNKRP | QAWDSTTV |
| | | 1617 | 1618 | 1619 | 1620 | 1621 | 1622 |
| 49 | VG9B64 | SISGVSVG | WLALIYWNDDKR | VHSGQWLEGDAFD | VHSDGNTYLSWL | LLIYKISNRF | MQATQFPL |
| | | 1651 | 1652 | 1653 | 1654 | 1655 | 1656 |
| 50 | VG9B21 | SNYDMN | WVSSISSSSHYIY | ARDRGVTTDYYYYALD | YNYLAWY | LLIYAASTLQ | QKYNRAPF |
| | | 1685 | 1686 | 1687 | 1688 | 1689 | 1690 |
| 51 | VG9B128 | GTYGMH | WVAVIWYNGSNKY | ARGGFGESFD | IDYLAWF | LLIYDASNRA | QQRSNWPL |
| | | 1719 | 1720 | 1721 | 1722 | 1723 | 1724 |
| 52 | VG9B66 | STYTMN | WVSSISSSSFYMD | ARDGDIVATIRGSFD | TNFLAWY | LLIYTASTLQ | QKYNSAPF |
| | | 1753 | 1754 | 1755 | 1756 | 1757 | 1758 |
| 53 | VG9B32 | SRYAMN | WVSFISGTGYTVY | ARDQEPGFD | VHSDGNTYLSWL | LLIYKISNRF | MQATHFPF |
| | | 1787 | 1788 | 1789 | 1790 | 1791 | 1792 |
| 54 | VG9B57 | SSHDMN | WVSSISSSSSYIF | ARDLGVGVRDYYYYGMD | TNYLAWF | RLIYAASSLQ | LQHDTYPY |
| | | 1821 | 1822 | 1823 | 1824 | 1825 | 1826 |
| 55 | VG9B135 | TTYGVGVG | WLALIYWNDDKR | AHDYDFWSGYFD | SSSYLAWY | LLIYGASSRA | QQYGSSPL |
| | | 1855 | 1856 | 1857 | 1858 | 1859 | 1860 |
| 56 | VG9B60 | TGYYMH | WMGRINPNSGVTH | ARGGSLVRGVISGLD | SGSYLAWY | LLIYGASSRA | QQYGSSPPY |
| | | 1889 | 1890 | 1891 | 1892 | 1893 | 1894 |
| 57 | VG9B409 | TSYYMH | WMGIINPSGGSTS | ARGSYGWYFD | TSSYLAWY | LLIYGASSRA | QQYGSSPPY |
| | | 1923 | 1924 | 1925 | 1926 | 1927 | 1928 |
| 58 | VG9B411 | SNYDMN | WVSSISSSSSYIY | ARDVGVTTDYYYYGMD | NSWLAWY | LLIYAASTLQ | QQYNNWPR |
| | | 1957 | 1958 | 1959 | 1960 | 1961 | 1962 |
| 59 | VG9B129 | SSYCIS | WMGGILPILSTAN | ARAHDYYYGMD | SNNYLAWY | LLIYGASSRA | QQYGSSPPY |
| | | 1991 | 1992 | 1993 | 1994 | 1995 | 1996 |
| 60 | VG9B396 | RGYYWN | WIGRIFTTGNTN | AREKWDSSSSALYFD | IGADYDVKWY | LLIYGNTDRP | QSYDSRLTGYV |
| | | 2025 | 2026 | 2027 | 2028 | 2029 | 2030 |
| 61 | VG9B470 | TTSGVGVG | WLALILWNDHTI | ARDKWELRDAFD | SRYLAWY | LLIYVASTLQ | QQLISYPY |
| | | 2059 | 2060 | 2061 | 2062 | 2063 | 2064 |
| 62 | VG9B111 | STYSVN | WVSSISSDSSYIF | ARDSVTGPFD | SHYLNWY | LLIYDSYILE | QQYDNLPY |
| | | 2093 | 2094 | 2095 | 2096 | 2097 | 2098 |
| 63 | VG9B169 | TNYFWN | WIGYIFYSGSTS | ARVGRWELRTAFD | IGSNTVNWY | LLIYSNNQRP | AAWDDSLNGPG |
| | | 2127 | 2128 | 2129 | 2130 | 2131 | 2132 |
| 64 | VG9B639 | TTYRMN | WVSSISSSSIYIH | ARERVYTVSFD | SHYLNWY | LLIYDSYILE | QQYDNLPY |
| | | 2161 | 2162 | 2163 | 2164 | 2165 | 2166 |
| 65 | VG9B201 | TTHGVGVG | WLALIYWNADKH | AHEGDWGHYFD | IGNNDVSWY | LLIYDNNRRP | ETWDSSLSAIW |
| | | 2195 | 2196 | 2197 | 2198 | 2199 | 2200 |
| 66 | VG9B161 | SSYFWS | WIGYIFYSGSTN | ARVGRWELRGAFD | IGSNTVNWY | LLIYSNNQRP | AAWDDSLNSPG |
| | | 2229 | 2230 | 2231 | 2232 | 2233 | 2234 |
| 67 | VG9B383 | SSYYWN | WVGRIYTIGNTN | AREGYYDSSGSFFPGAFG | VGSYNLVSWY | LMIYAGSKRP | CSFAGATNV |
| | | 2263 | 2264 | 2265 | 2266 | 2267 | 2268 |
| 68 | VG9B382 | SGYYWN | WIGRIFTTGNTN | ARERWDSSSSALYFD | IGADYDIKWY | LLIYGNSNRP | QSYDSSMSGYV |
| | | 2297 | 2298 | 2299 | 2300 | 2301 | 2302 |
| 69 | VG9B156 | SGYFWN | WIGYIFYSGSTN | AKLGKWELRTAFD | IGSDTVNWY | LLIYSNNQRP | AAWDDSLNGP |
| | | 2331 | 2332 | 2333 | 2334 | 2335 | 2336 |
| 70 | VG9B205 | SGYFWN | WIGYIFYSGSTN | AKLGKWELRTAFD | DKYACWY | LVIYQDSKRP | QAWDSSTV |
| | | 2365 | 2366 | 2367 | 2368 | 2369 | 2370 |
| 71 | VG9B86 | SSSYWS | CIGRFYSSGSTS | ARYSGSYWYFD | SSYLAWY | LLIYDTSNRA | QQRSDWLL |
| | | 2399 | 2400 | 2401 | 2402 | 2403 | 2404 |
| 72 | VG9B154 | SYYFWN | WIGYIYYSGSTN | AREGKWELRTTFD | IGSNTVNWY | LLIYSNNQRP | AAWDDSLNGP |
| | | 2433 | 2434 | 2435 | 2436 | 2437 | 2438 |
| 73 | VG9B159 | SSYYWS | WIGRFYTGGRNN | ARDMEYYYDRSGYSYWYFD | SKSVHWY | LVVYDDSDRP | QVWDSSSDHV |
| | | 2467 | 2468 | 2469 | 2470 | 2471 | 2472 |
| 74 | VG9B465 | TSYYWN | WIGRIYTIGNTN | AREGYYESDGSFFPGAFN | VGSYNLVSWY | LMIYAGSKRP | CSYAGTTNV |
| | | 2501 | 2502 | 2503 | 2504 | 2505 | 2506 |
| 75 | VG9B194 | TGDYMH | WMGWINPNSGYTN | TRELDALD | VGGYNYVSWY | LMIYEVSKRP | NSYAGSNNFE |
| | | 2535 | 2536 | 2537 | 2538 | 2539 | 2540 |
| 76 | VG9B182 | NNHFWS | WIGFVFYNGNTN | ARVGRWVLRTAFD | IGSNTVNWY | LLIYSNNQRP | AAWDDSLNGPG |
| | | 2569 | 2570 | 2571 | 2572 | 2573 | 2574 |
| 77 | VG9B173 | NNYFWS | WIGYIYYSGSTN | AREGKWELRSAFD | IESNTVNWY | LLIYSNNQRP | TAWDDSLNGP |
| | | 2603 | 2604 | 2605 | 2606 | 2607 | 2608 |
| 78 | VG9B87 | TSEYIH | WMGIINPSGGSTS | ARERGYSYGSFD | SSYLAWY | LLIYAASTLQ | QQFNSYSL |
| | | 2637 | 2638 | 2639 | 2640 | 2641 | 2642 |
| 79 | VG9B208 | SGYYWS | LIGYIFYSGSIN | ARVGKWELRSSFD | IGNNDVSWY | LLIYDNNKRP | GTWDSSLSVW |
| | | 2671 | 2672 | 2673 | 2674 | 2675 | 2676 |
| 80 | VG9B372 | SNGGFYWS | WLGYINYSGSTY | ARDRNYEWNFD | SSYLAWY | LLVYDASNRA | QQRSNWPL |
| | | 2705 | 2706 | 2707 | 2708 | 2709 | 2710 |
| 81 | VG9B186 | TNIRMSVS | WLAHIFSNDEKS | ARMRLPYGMD | IGSNTVNWY | LLIYSNNQRP | AAWDDSLNGP |
| | | 2739 | 2740 | 2741 | 2742 | 2743 | 2744 |
| 82 | VG9B177 | NNYFWS | WIGYIFYSGSTN | ARVGKWELRTAFD | VADYNYVSWY | LMIYEVSNRP | CSYTSSFTV |
| | | 2773 | 2774 | 2775 | 2776 | 2777 | 2778 |
| 83 | VG9B114 | SRYDMH | WVSAIGSAGDTY | ARGKWELRDAFD | HSYLAWY | LLIYVASTLQ | QQLNSYPY |
| | | 2807 | 2808 | 2809 | 2810 | 2811 | 2812 |
| 84 | VG9B147 | SGYFWN | WIGYIFYSGSTN | AREGKWELRSTFD | SYYATWY | LVIYGENNRP | NSRDTGDHHL |
| | | 2841 | 2842 | 2843 | 2844 | 2845 | 2846 |
| 85 | VG9B65 | NIYAIN | WMGGIIPFFGTAN | ARGGDSGYDWGFD | VHSDGNTYLSWL | LLIYQISNRF | MQATQFPL |
| | | 2875 | 2876 | 2877 | 2878 | 2879 | 2880 |
| 86 | VG9B81 | NTYYWS | LIGRIYTSDNTN | ARYNWNYWYFD | SSYLAWY | LLIYTASTLQ | QHLNSYPY |
| | | 2909 | 2910 | 2911 | 2912 | 2913 | 2914 |
| 87 | VG9B203 | GHYYWN | WIGRIYTSGSTN | ARSGGNFYWYFD | IGNNYVSWY | LLIYDNNKRP | GTWDSSLSAG |
| | | 2943 | 2944 | 2945 | 2946 | 2947 | 2948 |
| 88 | VG9B380 | SNYYWS | WIGRIYPSGITS | AGIMGTKGAFD | VGGYNYVSWY | LLIYEVSNRP | SSYTSTSV |
| | | 2977 | 2978 | 2979 | 2980 | 2981 | 2982 |
| 89 | VG9B103 | SSYAIS | WMGGIIPIFGTAT | ARGVGWGTDYYYGLD | VHSDGNTYLSWL | LLIYKISNRF | MQATHHPL |
| | | 3011 | 3012 | 3013 | 3014 | 3015 | 3016 |
| 90 | VG9B462 | SNYYWS | WIGRIYSSGITN | AGIVGVKGAFA | VGGYNYVSWY | LMIYEVSNRP | SSYTSTSV |
| | | 3045 | 3046 | 3047 | 3048 | 3049 | 3050 |
| 91 | VG9B461 | SNYYWS | WIGRIYSSGITN | AGIVGVKGAFA | VGGYNYVSWY | LMIYEVSNRP | SSYTSTSV |
| | | 3079 | 3080 | 3081 | 3082 | 3083 | 3084 |
| 92 | VG9B106 | TGYYLH | WVGWINPSSGDTD | ANELGIGVFD | LYSSNNKNYLGWY | LLIYWASTRE | QQYYSIPY |
| | | 3113 | 3114 | 3115 | 3116 | 3117 | 3118 |
| 93 | VG9B115 | STYGVGVG | WLALIYWNDDKR | SHESDWSYYFD | SSYLAWY | LLIYDASNRA | QQRSSWPW |
| | | 3147 | 3148 | 3149 | 3150 | 3151 | 3152 |
| 94 | VG9B27 | SSYVIS | WMGGILPILSTAN | ARAHDYYYGMD | VHSDGNTYLSWL | LLVYKISNRF | MQATHHPL |
| | | 3181 | 3182 | 3183 | 3184 | 3185 | 3186 |
| 95 | VG9B458 | SNYYWS | WIGRIYSSGITN | AGIVGVKGAFA | VGGYNYVSWY | LMIYEVSNRP | SSYTSTSV |
| | | 3215 | 3216 | 3217 | 3218 | 3219 | 3220 |
| 96 | VG9B131 | SSYDMN | WVSYISSSSTAKY | AREDIVVVTPILQ | SNYLAWY | LLIYDASNRA | QQRSNW |
| | | 3249 | 3250 | 3251 | 3252 | 3253 | 3254 |
| 97 | VG9B163 | SNHGMS | WVASITRGGDTTY | TRGPLTVGYAMD | IGHNYVSWY | LLIYDNNQRP | GIWDSSLSIV |
| | | 3283 | 3284 | 3285 | 3286 | 3287 | 3288 |
| 98 | VG9B454 | SNYYWS | WIGRIYSSGITN | AGIVGVKGAFA | VGGYNYVSWY | LMIYEVSNRP | SSYTSTSV |
| | | 3317 | 3318 | 3319 | 3320 | 3321 | 3322 |
| 99 | VG9B439 | SNYYWS | WIGRIYSSGITN | AGIVGVKGAFA | VGGYNYVSWY | LMIYEVSNRP | SSYTSTSV |
| | | 3351 | 3352 | 3353 | 3354 | 3355 | 3356 |
| 100 | VG9B68 | STYAIS | WMGGIIPIFGTAT | ARGVGWGSDYYYGLD | VHSDGNTYLSWL | LLIYKISNRF | IQATHHPL |
| | | 3385 | 3386 | 3387 | 3388 | 3389 | 3390 |
| 101 | VG9B449 | SNYYWS | WIGRIYSSGITN | AGIVGVKGAFA | VGGYNYVSWY | LMIYEVSNRP | SSYTSTSV |
| | | 3419 | 3420 | 3421 | 3422 | 3423 | 3424 |
| 102 | VG9B204 | SSFYWS | WIGRIYTSGGTI | ARWLRAFD | DKYACWY | LVIYQDSKRP | QAWDSSTV |
| | | 3453 | 3454 | 3455 | 3456 | 3457 | 3458 |
| 103 | VG9B459 | SNYYWS | WIGRIYSSGITN | AGIVGVKGAFA | VGGYNYVSWY | LMIYEVSNRP | SSYTSTSV |
| | | 3487 | 3488 | 3489 | 3490 | 3491 | 3492 |
| 104 | VG9B157 | SNHGMS | WVASITRGGDTTY | TRGPLTVGYAMD | SYYATWY | LVIYGENNRP | NSRDTGDHHL |
| | | 3521 | 3522 | 3523 | 3524 | 3525 | 3526 |
| 105 | VG9B453 | SNYYWS | WIGRIYSSGITN | AGIVGVKGAFA | VGGYNYVSWY | LMIYEVSNRP | SSYTSTSV |
| | | 3555 | 3556 | 3557 | 3558 | 3559 | 3560 |
| 106 | VG9B443 | SNYYWS | WIGRIYSSGITN | AGIVGVKGAFA | VGGYNYVSWY | LMIYEVSNRP | SSYTSTSV |
| | | 3589 | 3590 | 3591 | 3592 | 3593 | 3594 |
| 107 | VG9B455 | SNYYWS | WIGRIYSSGITN | AGIVGVKGAFA | VGGYNYVSWY | LMIYEVSNRP | SSYTSTSV |
| | | 3623 | 3624 | 3625 | 3626 | 3627 | 3628 |
| 108 | VG9B466 | SNYYWS | WIGRIYSSGITN | AGIVGVKGAFA | VGGYNYVSWY | LMIYEVSNRP | SSYTSTSV |
| | | 3657 | 3658 | 3659 | 3660 | 3661 | 3662 |
| 109 | VG9B450 | SNYYWS | WIGRIYSSGITN | AGIVGVKGAFA | VGGYNYVSWY | LMIYEVSNRP | SSYTSTSV |
| | | 3691 | 3692 | 3693 | 3694 | 3695 | 3696 |
| 110 | VG9B438 | SNYYWS | WIGRIYSSGITN | AGIVGVKGAFA | VGGYNYVSWY | LMIYEVSNRP | SSYTSTSV |
| | | 3725 | 3726 | 3727 | 3728 | 3729 | 3730 |
| 111 | VG9B464 | SNYYWS | WIGRIYSSGITN | AGIVGVKGAFA | VGGYNYVSWY | LMIYEVSNRP | SSYTSTSV |
| | | 3759 | 3760 | 3761 | 3762 | 3763 | 3764 |
| 112 | VG9B437 | SNYYWS | WIGRIYSSGITN | AGIVGVKGAFA | VGGYNYVSWY | LMIYEVSNRP | SSYTSTSV |
| | | 3793 | 3794 | 3795 | 3796 | 3797 | 3798 |
| 113 | VG9B457 | SNYYWS | WIGRIYSSGITN | AGIVGVKGAFA | VGGYNYVSWY | LMIYEVSNRP | SSYTSTSV |
| | | 3827 | 3828 | 3829 | 3830 | 3831 | 3832 |
| 114 | VG9B442 | SNYYWS | WIGRIYSSGITN | AGIVGVKGAFA | VGGYNYVSWY | LMIYEVSNRP | SSYTSTSV |
| | | 3861 | 3862 | 3863 | 3864 | 3865 | 3866 |
| 115 | VG9B436 | SNYYWS | WIGRIYSSGITN | AGIVGVKGAFA | VGGYNYVSWY | LMIYEVSNRP | SSYTSTSV |
| | | 3895 | 3896 | 3897 | 3898 | 3899 | 3900 |
| 116 | VG9B434 | SNYYWS | WIGRIYSSGITN | AGIVGVKGAFA | VGGYNYVSWY | LMIYEVSNRP | SSYTSTSV |
| | | 3929 | 3930 | 3931 | 3932 | 3933 | 3934 |
| 117 | VG9B460 | SNYYWS | WIGRIYSSGITN | AGIVGVKGAFA | VGGYNYVSWY | LMIYEVSNRP | SSYTSTSV |
| | | 3963 | 3964 | 3965 | 3966 | 3967 | 3968 |
| 118 | VG9B189 | SNHGMS | WVASITRGGDTTY | TRGPLTVGYAMD | VGGYNYVSWY | LMIYEVSKRP | NSYAGSNNFE |
| | | 3997 | 3998 | 3999 | 4000 | 4001 | 4002 |
| 119 | VG9B452 | SNYYWS | WIGRIYSSGITN | AGIVGVKGAFA | VGGYNYVSWY | LMIYEVSNRP | SSYTSTSV |
| | | 4031 | 4032 | 4033 | 4034 | 4035 | 4036 |
| 120 | VG9B53 | SSYYWS | WIGRIHTIGSIN | AMEGVGATNYYYGMA | LHSNGYNYLDWY | LLIYLGSNRA | MQALQTPY |
| | | 4065 | 4066 | 4067 | 4068 | 4069 | 4070 |
| 121 | VG9B41 | TTYWMH | WIGLIDPSDSETR | ASNRWLL | VHSDGNTYLSWL | LLIYKISNRF | VQTREFPL |
| | | 4099 | 4100 | 4101 | 4102 | 4103 | 4104 |
| 122 | VG9B136 | SSNRAAWN | WLGRTYYRSKWYNE | ARDLWELREACD | SSYLAWY | LLIYVASTLQ | QQLNSYPF |
| | | 4133 | 4134 | 4135 | 4136 | 4137 | 4138 |
| 123 | VG9B399 | SNYDMN | WVSSISSSSSYIY | ARDVGVTTDYYYYGMD | ASSYLAWY | LLIYGASSRA | QQYGSSPPY |
| | | 4167 | 4168 | 4169 | 4170 | 4171 | 4172 |
| 124 | VG9B369 | STIGVGVG | WLSLIYWNDDKR | AHSHDWVHAFD | SHYLNWY | FLIYDASNLD | QQYDNFPL |
| | | 4201 | 4202 | 4203 | 4204 | 4205 | 4206 |
| 125 | VG9B144 | TGYYMH | WMGWINPNSGATN | AREDDAFD | NYYATWF | LVFFGKNNRP | NSRDSSGNHV |
| | | 4235 | 4236 | 4237 | 4238 | 4239 | 4240 |
| 126 | VG9B410 | SNYGMN | WVSYISSGSSYKY | ARDPVVTEYYYYGMD | NSWLAWY | LLIYAASSLQ | QQANSFPW |
| | | 4269 | 4270 | 4271 | 4272 | 4273 | 4274 |
| 127 | VG9B386 | SSYSMI | WVSSIGSSSTYIY | ARDGETGGFD | SRSYLAWY | LLIYGPSNRA | QQYGSLPL |
| | | 4303 | 4304 | 4305 | 4306 | 4307 | 4308 |
| 128 | VG9B125 | SSYDMN | WVSYISSSSTAKY | AREDIVVVTPILQ | SKDLAWY | LLIYDASNRA | QQRINWPLF |
| | | 4337 | 4338 | 4339 | 4340 | 4341 | 4342 |
| 129 | VG9B112 | SSNSAAWN | WLGGTYYRSKWFNN | ARGEWGLRDAFD | HSYLAWY | LLIYVASTLQ | QQLNSYPW |
| | | 4371 | 4372 | 4373 | 4374 | 4375 | 4376 |
| 130 | VG9B371 | SSYDMN | WVSSISSSSSYIY | ARDRGVGGTDYYYYGLD | SSSYLAWY | LLIYGASSRA | QQYGSSPPY |
| | | 4405 | 4406 | 4407 | 4408 | 4409 | 4410 |
| 131 | VG9B387 | TGYYLQ | WMGWINPNSGYTD | ARLDDAFD | NYYAIWY | LVIFGKNNRP | NSRDSSGNHW |
| | | 4439 | 4440 | 4441 | 4442 | 4443 | 4444 |
| 132 | VG9B47 | SNYAIS | WMGGIIPFFGTPD | STGGGYGDYDYYYGIN | VHSDGNTYLSWL | LLIYKISNRF | MQAKEFPL |
| | | 4473 | 4474 | 4475 | 4476 | 4477 | 4478 |
| 133 | VG9B379 | TGDYIH | WMGWINPNSGGTN | AREGGVAPAAPDAFD | SYYARWY | VVIYGKNNRP | NSRDSSGNHR |
| | | 4507 | 4508 | 4509 | 4510 | 4511 | 4512 |
| 134 | VG9B447 | SNYYWS | WIGRIYSSGITN | AGIVGVKGAFA | VGGYNYVSWY | LMIYEVSNRP | SSYTSTSV |
| | | 4541 | 4542 | 4543 | 4544 | 4545 | 4546 |
| 135 | VG9B392 | TGYYIH | WMGWINPNSGYTN | AREDDAFD | SYYARWY | LVIYGKNNRP | NSRDNSGNHV |
| | | 4575 | 4576 | 4577 | 4578 | 4579 | 4580 |
| 136 | VG9B96 | SNYAIS | WMGGIIPIFSAGT | SSNSGTYYDYYYGMD | VHSDGNTYLSWL | LLIYKIFNRL | MQAKQFPL |
| | | 4609 | 4610 | 4611 | 4612 | 4613 | 4614 |
| 137 | VG9B77 | SSYAIS | WMGGIIPFFGTAD | ATATVTTDYYYGMD | VHSDGNTYLSWL | LLIYEISNRF | MQARQFPL |
| | | 4643 | 4644 | 4645 | 4646 | 4647 | 4648 |

TABLE 7
IMGT CDR Amino Acid Sequences (SEQ ID NO
disclosed in the cell under each respective sequence)

| | Protein | HC IMGT | HC IMGT | HC IMGT | LC IMGT | LC IMGT | LC IMGT |
|---|---|---|---|---|---|---|---|
| # | Name | CDR1 | CDR2 | CDR3 | CDR1 | CDR2 | CDR3 |
| 1 | VG9B54 | GFAFSSYS | ISSSSSYI | ATDGELGPFDY | QSVSSSY | GAS | QQYGRSPLT |
| | | 25 | 26 | 27 | 28 | | 30 |
| 2 | VG9B121 | GFTFSDYA | ISSTSNYI | ANSYNWNYGGAFDI | QSVSSSY | GAS | QQYGRSPLT |
| | | 59 | 60 | 61 | 62 | | 64 |
| 3 | VG9B429 | GFTFSNYD | ISSSSSYI | ARDVGVTTDYYYYGMDV | QGINSW | AAS | QQANSFPWT |
| | | 93 | 94 | 95 | 96 | | 98 |
| 4 | VG9B370 | RFTLSSYD | ISSSSSYI | ARDRGVGGTDYYYYGLDV | QSVSSSY | GAS | QQYGSSPPYT |
| | | 127 | 128 | 129 | 130 | | 132 |
| 5 | VG9B80 | GFTFSTYS | ISSSSSYI | AKDGELGVFDY | QSISSSY | GPS | QQFGRSPLT |
| | | 161 | 162 | 163 | 164 | | 166 |
| 6 | VG9B414 | GFTFSNYD | ISSSSSYI | ARDVGVTTDYYYYGMDV | QGINSW | AAS | QQANSFPWT |
| | | 195 | 196 | 197 | 198 | | 200 |
| 7 | VG9B195 | GFTFSPYT | ISSSSSYM | ARDGDLVGPTYYFDY | KLGDKY | QHN | QAWDSTTVV |
| | | 229 | 230 | 231 | 232 | | 234 |
| 8 | VG9B140 | GFTFRSYD | ISTSSGYI | ARDRGIAVAGDYYYGMDV | QSVSSSY | GAS | QQYGSSPPYT |
| | | 263 | 264 | 265 | 266 | | 268 |
| 9 | VG9B426 | GFTFSNYD | ISSSSSYI | ARDVGVTTDYYYYGMDV | QSVASSY | GAS | QQYGSSPPYT |
| | | 297 | 298 | 299 | 300 | | 302 |
| 10 | VG9B46 | GFTFSINS | ISSTSDYI | VRDDVFGAFDI | QSVSRSY | GSS | QQYSRSPLT |
| | | 331 | 332 | 333 | 334 | | 336 |
| 11 | VG9B416 | GFTFSNYD | ISSSSSYI | ARDVGVTTDYYYYGMDV | QSVASSY | GAS | QQYGSSPPYT |
| | | 365 | 366 | 367 | 368 | | 370 |
| 12 | VG9B69 | GFTFSSYD | ITSSSYYI | ARDLGVRGVDYYYYGLDV | QSVSSSY | GAS | QQYGSSPPYT |
| | | 399 | 400 | 401 | 402 | | 404 |
| 13 | VG9B415 | GFTFSNYD | ISSSSSYI | ARDVGVTTDYYYYGMDV | QSVASSY | GAS | QQYGSSPPYT |
| | | 433 | 434 | 435 | 436 | | 438 |
| 14 | VG9B104 | GFTFSVYS | IGSSSSYI | GRDHDYGGLDY | QSVSSSY | GPS | QQYGRSPLT |
| | | 467 | 468 | 469 | 470 | | 472 |
| 15 | VG9B198 | GDSISSIY | IYTTDIT | AKNGYSYGGFNY | SSNIGAGYD | GDS | QSYDSSLSVVV |
| | | 501 | 502 | 503 | 504 | | 506 |
| 16 | VG9B463 | GFTFSNYD | ISSSSSYI | ARDVGVTTDYYYYGMDV | SSNIGSNT | TNT | AAWDDSLNAWV |
| | | 535 | 536 | 537 | 538 | | 540 |
| 17 | VG9B469 | GFTFSHYD | ISSSSSYI | ARDRGVGDTSDYYSFGLDV | QNVSSTY | GAC | QQYGSSPPYT |
| | | 569 | 570 | 571 | 572 | | 574 |
| 18 | VG9B428 | GFTFSNYG | ISSGSSYK | ARDPVVTEYYYYGMDV | QGINSW | AAS | QQANSFPWT |
| | | 603 | 604 | 605 | 606 | | 608 |
| 19 | VG9B430 | GFTFSSYD | ISSSSSYI | ARDVGVTTDYYYYGMDV | QSVASSY | GAS | QQYGSSPPYT |
| | | 637 | 638 | 639 | 640 | | 642 |
| 20 | VG9B423 | GFTFSNYD | ISSSSSYI | ARDVGVTTDYYYYGMDV | QSVASSY | GAS | QQYGSSPPYT |
| | | 671 | 672 | 673 | 674 | | 676 |
| 21 | VG9B98 | GFTFSSYS | IGSSSTYI | ARDGELGPFEY | QSVSTSY | GTS | LQYGRSPLT |
| | | 705 | 706 | 707 | 708 | | 710 |
| 22 | VG9B73 | GFTFSNYD | ISSSSSYI | AREIGVTGTTYYQDYGMDV | QSFSSNY | GAS | QQYGSSPPFT |
| | | 739 | 740 | 741 | 742 | | 744 |
| 23 | VG9B133 | GFTFSNYD | ISSSSSYI | ARDLGITGTTMDYYYGMDV | QSVSSSY | GAS | QQYGSSPPYT |
| | | 773 | 774 | 775 | 776 | | 778 |
| 24 | VG9B368 | GFTFNSYD | ISSSSSYI | ARDRGIGGDYYSYAMDV | QSVSSSY | GAS | QQYGSSPPYT |
| | | 807 | 808 | 809 | 810 | | 812 |
| 25 | VG9B424 | GFTFSNYD | ISSSSSYI | ARDVGVTTDYYYYGMDV | QSVASSY | GAS | QQYGSSPPYT |
| | | 841 | 842 | 843 | 844 | | 846 |
| 26 | VG9B427 | GFTFSNYD | ISSSSSYI | ARDVGVTTDYYYYGMDV | QSVASSY | GAS | QQYGSSPPYT |
| | | 875 | 876 | 877 | 878 | | 880 |
| 27 | VG9B417 | GFTFSNYG | ISSGSSYK | ARDPVVTEYYYYGMDV | QGINSW | AAS | QQANSFPWT |
| | | 909 | 910 | 911 | 912 | | 914 |
| 28 | VG9B58 | GGSIKSSY | MFYLGST | SRERPVLDAFDI | QDITNY | AAS | LQHDTYPYT |
| | | 943 | 944 | 945 | 946 | | 948 |
| 29 | VG9B419 | GFTFSNYD | ISSSSSYI | ARDVGVTTDYYYYGMDV | QSVASSY | GAS | QQYGSSPPYT |
| | | 977 | 978 | 979 | 980 | | 982 |
| 30 | VG9B425 | GFTFSNYD | ISSSSSYI | ARDVGVTTDYYYYGMDV | QSVASSY | GAS | QQYGSSPPYT |
| | | 1011 | 1012 | 1013 | 1014 | | 1016 |
| 31 | VG9B143 | GFTFSTYG | ISTSSYTI | AREGDWWYFDL | SSDVGGYNY | EVS | SSYTSSSTLV |
| | | 1045 | 1046 | 1047 | 1048 | | 1050 |
| 32 | VG9B418 | GFTFSNYD | ISSSSSYI | ARDVGVTTDYYYYGMDV | QSVASSY | GAS | QQYGSSPPYT |
| | | 1079 | 1080 | 1081 | 1082 | | 1084 |
| 33 | VG9B472 | GFTFSHYD | ISSSSSYI | ARDRGVGDTSDYYSFGLDV | QGIATY | AAS | QKYNSAPPWT |
| | | 1113 | 1114 | 1115 | 1116 | | 1118 |
| 34 | VG9B421 | GFTFSNYG | ISSGSSYK | ARDPVVTEYYYYGMDV | QGINSW | AAS | QQANSFPWT |
| | | 1147 | 1148 | 1149 | 1150 | | 1152 |
| 35 | VG9B88 | GFTFSSYT | ISTSSSYI | ARDGDMVAPIKGSFDY | QSLLNSDDGNTY | TLS | MQRIEFPIT |
| | | 1181 | 1182 | 1183 | 1184 | | 1186 |
| 36 | VG9B384 | GFSLSSSGMC | IDWFDDK | ARIRGTGAYYYGLDV | ELGDKY | QDN | QAWDSSKVV |
| | | 1215 | 1216 | 1217 | 1218 | | 1220 |
| 37 | VG9B413 | GFTFSNYD | ISSSSSYI | ARDVGVTTDYYYYGMDV | QSVASSY | GAS | QQYGSSPPYT |
| | | 1249 | 1250 | 1251 | 1252 | | 1254 |
| 38 | VG9B36 | GFTFSSYG | ISTGSSYI | ARDKGLAVTGYIMDV | QDISNY | DAS | QQYDNLPMYT |
| | | 1283 | 1284 | 1285 | 1286 | | 1288 |
| 39 | VG9B403 | GFTFSNYD | ISSSSSYI | ARDVGVTTDYYYYGMDV | QSVASSY | GAS | QQYGSSPPYT |
| | | 1317 | 1318 | 1319 | 1320 | | 1322 |
| 40 | VG9B191 | GFTFSRYS | ISSSSSYI | ARDGPTVNWDYYFDL | SSNIGNNY | DNN | GTWDSSLSTSVV |
| | | 1351 | 1352 | 1353 | 1354 | | 1356 |
| 41 | VG9B44 | GDSVSSNSAA | TYYRSKWYN | ARESGSYYTDGFDI | QGISSY | AAS | QEFNSYPYT |
| | | 1385 | 1386 | 1387 | 1388 | | 1390 |
| 42 | VG9B67 | GFTFSSYT | ISSSSSYI | ARDGDILATIRGSFDY | QSLLDSDAGNTY | TLS | MQRIEFPIT |
| | | 1419 | 1420 | 1421 | 1422 | | 1424 |
| 43 | VG9B402 | GFTFSNYG | ISSGSSYK | ARDPVVTEYYYYGMDV | QGINSW | AAS | QQANSFPWT |
| | | 1453 | 1454 | 1455 | 1456 | | 1458 |
| 44 | VG9B127 | GFTFGAYT | ISSSSSYI | ARDGDIVSTIRGSFDY | QSLLDSDDGNTY | TLS | MQRIEFPIT |
| | | 1487 | 1488 | 1489 | 1490 | | 1492 |
| 45 | VG9B137 | GITFSSYS | IGSSSSYI | ATSYSWNYGGAFDI | QSVSSSY | GAS | QQYGSSPPYT |
| | | 1521 | 1522 | 1523 | 1524 | | 1526 |
| 46 | VG9B33 | GFTFSSYN | ISTSSSYI | ARDTSVTKYPDTFDI | QDINNY | GAS | QKYNSAPFT |
| | | 1555 | 1556 | 1557 | 1558 | | 1560 |
| 47 | VG9B162 | GYTFTGDY | INPNSGYT | AREGDAFDV | SSDVGGYNY | EVS | NSYAGSNNFEV |
| | | 1589 | 1590 | 1591 | 1592 | | 1594 |
| 48 | VG9B152 | GFTFSSYS | ISSSSDYI | ARDWELLGFDC | KLGDKY | QHN | QAWDSTTVV |
| | | 1623 | 1624 | 1625 | 1626 | | 1628 |
| 49 | VG9B64 | GFSLSISGVS | IYWNDDK | VHSGQWLEGDAFDI | ESLVHSDGNTY | KIS | MQATQFPLT |
| | | 1657 | 1658 | 1659 | 1660 | | 1662 |
| 50 | VG9B21 | GFSFSNYD | ISSSSHYI | ARDRGVTTDYYYYALDV | QGIYNY | AAS | QKYNRAPFT |
| | | 1691 | 1692 | 1693 | 1694 | | 1696 |
| 51 | VG9B128 | GFTFGTYG | IWYNGSNK | ARGGFGESFDS | QSVIDY | DAS | QQRSNWPLT |
| | | 1725 | 1726 | 1727 | 1728 | | 1730 |
| 52 | VG9B66 | GFTFSTYT | ISSSSFYM | ARDGDIVATIRGSFDY | QDITNF | TAS | QKYNSAPFT |
| | | 1759 | 1760 | 1761 | 1762 | | 1764 |
| 53 | VG9B32 | GFTFSRYA | ISGTGYTV | ARDQEPGFDY | QSLVHSDGNTY | KIS | MQATHFPFT |
| | | 1793 | 1794 | 1795 | 1796 | | 1798 |
| 54 | VG9B57 | GFTFSSHD | ISSSSSYI | ARDLGVGVRDYYYYGMDV | QDITNY | AAS | LQHDTYPYT |
| | | 1827 | 1828 | 1829 | 1830 | | 1832 |
| 55 | VG9B135 | GFSLTTYGVG | IYWNDDK | AHDYDFWSGYFDY | QSVSSSY | GAS | QQYGSSPLT |
| | | 1861 | 1862 | 1863 | 1864 | | 1866 |
| 56 | VG9B60 | GYTFTGYY | INPNSGVT | ARGGSLVRGVISGLDY | QSFSGSY | GAS | QQYGSSPPYT |
| | | 1895 | 1896 | 1897 | 1898 | | 1900 |
| 57 | VG9B409 | GYTLTSYY | INPSGGST | ARGSYGWYFDL | QSVTSSY | GAS | QQYGSSPPYT |
| | | 1929 | 1930 | 1931 | 1932 | | 1934 |
| 58 | VG9B411 | GFTFSNYD | ISSSSSYI | ARDVGVTTDYYYYGMDV | QGINSW | AAS | QQYNNWPRT |
| | | 1963 | 1964 | 1965 | 1966 | | 1968 |
| 59 | VG9B129 | GGTFSSYV | ILPILSTA | ARAHDYYYGMDV | QSVSNNY | GAS | QQYGSSPPYT |
| | | 1997 | 1998 | 1999 | 2000 | | 2002 |
| 60 | VG9B396 | GDSIRGYY | IFTTGNT | AREKWDSSSSALYFDF | SSNIGADYD | GNT | QSYDSRLTGYVV |
| | | 2031 | 2032 | 2033 | 2034 | | 2036 |
| 61 | VG9B470 | GFSLTTSGVG | ILWNDHT | ARDKWELRDAFDI | QGISRY | VAS | QQLISYPYT |
| | | 2065 | 2066 | 2067 | 2068 | | 2070 |
| 62 | VG9B111 | GFTFSTYS | ISSDSSYI | ARDSVTGPFDY | QDISHY | DSY | QQYDNLPYT |
| | | 2099 | 2100 | 2101 | 2102 | | 2104 |
| 63 | VG9B169 | GGSITNYF | IFYSGST | ARVGRWELRTAFDI | SSNIGSNT | SNN | AAWDDSLNGPGV |
| | | 2133 | 2134 | 2135 | 2136 | | 2138 |
| 64 | VG9B639 | GFTFTTYR | ISSSSIYI | ARERVYTVSFDY | QDISHY | DSY | QQYDNLPYT |
| | | 2167 | 2168 | 2169 | 2170 | | 2172 |
| 65 | VG9B201 | GFSLTTHGVG | IYWNADK | AHEGDWGHYFDF | SSNIGNND | DNN | ETWDSSLSAIWV |
| | | 2201 | 2202 | 2203 | 2204 | | 2206 |
| 66 | VG9B161 | GGSISSYF | IFYSGST | ARVGRWELRGAFDI | SSNIGSNT | SNN | AAWDDSLNSPGV |
| | | 2235 | 2236 | 2237 | 2238 | | 2240 |
| 67 | VG9B383 | SGSISSYY | IYTIGNT | AREGYYDSSGSFFPGAFGI | SNDVGSYNL | AGS | CSFAGATNVV |
| | | 2269 | 2270 | 2271 | 2272 | | 2274 |
| 68 | VG9B382 | GDSISGYY | IFTTGNT | ARERWDSSSSALYFDY | SSNIGADYD | GNS | QSYDSSMSGYVV |
| | | 2303 | 2304 | 2305 | 2306 | | 2308 |
| 69 | VG9B156 | NGSISGYF | IFYSGST | AKLGKWELRTAFDI | TSNIGSDT | SNN | AAWDDSLNGPV |
| | | 2337 | 2338 | 2339 | 2340 | | 2342 |
| 70 | VG9B205 | NGSISGYF | IFYSGST | AKLGKWELRTAFDI | KLGDKY | QDS | QAWDSSTVV |
| | | 2371 | 2372 | 2373 | 2374 | | 2376 |
| 71 | VG9B86 | GDSISSSY | FYSSGST | ARYSGSYWYFDL | QSVSSY | DTS | QQRSDWLLT |
| | | 2405 | 2406 | 2407 | 2408 | | 2410 |
| 72 | VG9B154 | GGSISYYF | IYYSGST | AREGKWELRTTFDI | SSNIGSNT | SNN | AAWDDSLNGPV |
| | | 2439 | 2440 | 2441 | 2442 | | 2444 |
| 73 | VG9B159 | GGSISSYY | FYTGGRN | ARDMEYYYDRSGYSYWYFDL | NIGSKS | DDS | QVWDSSSDHVV |
| | | 2473 | 2474 | 2475 | 2476 | | 2478 |
| 74 | VG9B465 | GGSITSYY | IYTIGNT | AREGYYESDGSFFPGAFNI | SNDVGSYNL | AGS | CSYAGTTNVV |
| | | 2507 | 2508 | 2509 | 2510 | | 2512 |
| 75 | VG9B194 | GYTFTGDY | INPNSGYT | TRELDALDV | SSDVGGYNY | EVS | NSYAGSNNFEV |
| | | 2541 | 2542 | 2543 | 2544 | | 2546 |
| 76 | VG9B182 | GDSINNHF | VFYNGNT | ARVGRWVLRTAFDI | SSNIGSNT | SNN | AAWDDSLNGPGV |
| | | 2575 | 2576 | 2577 | 2578 | | 2580 |
| 77 | VG9B173 | GGSINNYF | IYYSGST | AREGKWELRSAFDI | SSNIESNT | SNN | TAWDDSLNGPV |
| | | 2609 | 2610 | 2611 | 2612 | | 2614 |
| 78 | VG9B87 | GYTFTSEY | INPSGGST | ARERGYSYGSFDY | QGISSY | AAS | QQFNSYSLT |
| | | 2643 | 2644 | 2645 | 2646 | | 2648 |
| 79 | VG9B208 | GGSISGYY | IFYSGSI | ARVGKWELRSSFDI | TSNIGNND | DNN | GTWDSSLSVWV |
| | | 2677 | 2678 | 2679 | 2680 | | 2682 |
| 80 | VG9B372 | GGSISNGGFY | INYSGST | ARDRNYEWNFDL | QSVSSY | DAS | QQRSNWPLT |
| | | 2711 | 2712 | 2713 | 2714 | | 2716 |
| 81 | VG9B186 | GFSLTNIRMS | IFSNDEK | ARMRLPYGMDV | TSNIGSNT | SNN | AAWDDSLNGPV |
| | | 2745 | 2746 | 2747 | 2748 | | 2750 |
| 82 | VG9B177 | GGSINNYF | IFYSGST | ARVGKWELRTAFDI | SSDVADYNY | EVS | CSYTSSFTVV |
| | | 2779 | 2780 | 2781 | 2782 | | 2784 |
| 83 | VG9B114 | GFTFSRYD | IGSAGDT | ARGKWELRDAFDI | QGIHSY | VAS | QQLNSYPYT |
| | | 2813 | 2814 | 2815 | 2816 | | 2818 |
| 84 | VG9B147 | GGSISGYF | IFYSGST | AREGKWELRSTFDI | SLRSYY | GEN | NSRDTGDHHLV |
| | | 2847 | 2848 | 2849 | 2850 | | 2852 |
| 85 | VG9B65 | GGTFNIYA | IIPFFGTA | ARGGDSGYDWGFDY | QSLVHSDGNTY | QIS | MQATQFPLT |
| | | 2881 | 2882 | 2883 | 2884 | | 2886 |
| 86 | VG9B81 | GGSINTYY | IYTSDNT | ARYNWNYWYFDL | QGISSY | TAS | QHLNSYPYT |
| | | 2915 | 2916 | 2917 | 2918 | | 2920 |
| 87 | VG9B203 | GDSIGHYY | IYTSGST | ARSGGNFYWYFDL | SSNIGNNY | DNN | GTWDSSLSAGV |
| | | 2949 | 2950 | 2951 | 2952 | | 2954 |
| 88 | VG9B380 | GGSISNYY | IYPSGIT | AGIMGTKGAFDI | SSDVGGYNY | EVS | SSYTSTSVV |
| | | 2983 | 2984 | 2985 | 2986 | | 2988 |
| 89 | VG9B103 | GGTFSSYA | IIPIFGTA | ARGVGWGTDYYYGLDV | QGLVHSDGNTY | KIS | MQATHHPLT |
| | | 3017 | 3018 | 3019 | 3020 | | 3022 |
| 90 | VG9B462 | GGSISNYY | IYSSGIT | AGIVGVKGAFAI | SSDVGGYNY | EVS | SSYTSTSVV |
| | | 3051 | 3052 | 3053 | 3054 | | 3056 |
| 91 | VG9B461 | GGSISNYY | IYSSGIT | AGIVGVKGAFAI | SSDVGGYNY | EVS | SSYTSTSVV |
| | | 3085 | 3086 | 3087 | 3088 | | 3090 |
| 92 | VG9B106 | GYTFTGYY | INPSSGDT | ANELGIGVFDY | QSVLYSSNNKNY | WAS | QQYYSIPYT |
| | | 3119 | 3120 | 3121 | 3122 | | 3124 |
| 93 | VG9B115 | GFSLSTYGVG | IYWNDDK | SHESDWSYYFDY | QSVSSY | DAS | QQRSSWPWT |
| | | 3153 | 3154 | 3155 | 3156 | | 3158 |
| 94 | VG9B27 | GGTFSSYV | ILPILSTA | ARAHDYYYGMDV | QSLVHSDGNTY | KIS | MQATHHPLT |
| | | 3187 | 3188 | 3189 | 3190 | | 3192 |
| 95 | VG9B458 | GGSISNYY | IYSSGIT | AGIVGVKGAFAI | SSDVGGYNY | EVS | SSYTSTSVV |
| | | 3221 | 3222 | 3223 | 3224 | | 3226 |
| 96 | VG9B131 | GFTFSSYD | ISSSSTAK | AREDIVVVTPILQH | QSVSNY | DAS | QQRSNWT |
| | | 3255 | 3256 | 3257 | 3258 | | 3260 |
| 97 | VG9B163 | GFTFSNHG | ITRGGDTT | TRGPLTVGYAMDY | SSNIGHNY | DNN | GIWDSSLSIVV |
| | | 3289 | 3290 | 3291 | 3292 | | 3294 |
| 98 | VG9B454 | GGSISNYY | IYSSGIT | AGIVGVKGAFAI | SSDVGGYNY | EVS | SSYTSTSVV |
| | | 3323 | 3324 | 3325 | 3326 | | 3328 |
| 99 | VG9B439 | GGSISNYY | IYSSGIT | AGIVGVKGAFAI | SSDVGGYNY | EVS | SSYTSTSVV |
| | | 3357 | 3358 | 3359 | 3360 | | 3362 |
| 100 | VG9B68 | GGTFSTYA | IIPIFGTA | ARGVGWGSDYYYGLDV | QSLVHSDGNTY | KIS | IQATHHPLT |
| | | 3391 | 3392 | 3393 | 3394 | | 3396 |
| 101 | VG9B449 | GGSISNYY | IYSSGIT | AGIVGVKGAFAI | SSDVGGYNY | EVS | SSYTSTSVV |
| | | 3425 | 3426 | 3427 | 3428 | | 3430 |
| 102 | VG9B204 | YGSFSSFY | IYTSGGT | ARWLRAFDY | KLGDKY | QDS | QAWDSSTVV |
| | | 3459 | 3460 | 3461 | 3462 | | 3464 |
| 103 | VG9B459 | GGSISNYY | IYSSGIT | AGIVGVKGAFAI | SSDVGGYNY | EVS | SSYTSTSVV |
| | | 3493 | 3494 | 3495 | 3496 | | 3498 |
| 104 | VG9B157 | GFTFSNHG | ITRGGDTT | TRGPLTVGYAMDY | SLRSYY | GEN | NSRDTGDHHLV |
| | | 3527 | 3528 | 3529 | 3530 | | 3532 |
| 105 | VG9B453 | GGSISNYY | IYSSGIT | AGIVGVKGAFAI | SSDVGGYNY | EVS | SSYTSTSVV |
| | | 3561 | 3562 | 3563 | 3564 | | 3566 |
| 106 | VG9B443 | GGSISNYY | IYSSGIT | AGIVGVKGAFAI | SSDVGGYNY | EVS | SSYTSTSVV |
| | | 3595 | 3596 | 3597 | 3598 | | 3600 |
| 107 | VG9B455 | GGSISNYY | IYSSGIT | AGIVGVKGAFAI | SSDVGGYNY | EVS | SSYTSTSVV |
| | | 3629 | 3630 | 3631 | 3632 | | 3634 |
| 108 | VG9B466 | GGSISNYY | IYSSGIT | AGIVGVKGAFAI | SSDVGGYNY | EVS | SSYTSTSVV |
| | | 3663 | 3664 | 3665 | 3666 | | 3668 |
| 109 | VG9B450 | GGSISNYY | IYSSGIT | AGIVGVKGAFAI | SSDVGGYNY | EVS | SSYTSTSVV |
| | | 3697 | 3698 | 3699 | 3700 | | 3702 |
| 110 | VG9B438 | GGSISNYY | IYSSGIT | AGIVGVKGAFAI | SSDVGGYNY | EVS | SSYTSTSVV |
| | | 3731 | 3732 | 3733 | 3734 | | 3736 |
| 111 | VG9B464 | GGSISNYY | IYSSGIT | AGIVGVKGAFAI | SSDVGGYNY | EVS | SSYTSTSVV |
| | | 3765 | 3766 | 3767 | 3768 | | 3770 |
| 112 | VG9B437 | GGSISNYY | IYSSGIT | AGIVGVKGAFAI | SSDVGGYNY | EVS | SSYTSTSVV |
| | | 3799 | 3800 | 3801 | 3802 | | 3804 |
| 113 | VG9B457 | GGSISNYY | IYSSGIT | AGIVGVKGAFAI | SSDVGGYNY | EVS | SSYTSTSVV |
| | | 3833 | 3834 | 3835 | 3836 | | 3838 |
| 114 | VG9B442 | GGSISNYY | IYSSGIT | AGIVGVKGAFAI | SSDVGGYNY | EVS | SSYTSTSVV |
| | | 3867 | 3868 | 3869 | 3870 | | 3872 |
| 115 | VG9B436 | GGSISNYY | IYSSGIT | AGIVGVKGAFAI | SSDVGGYNY | EVS | SSYTSTSVV |
| | | 3901 | 3902 | 3903 | 3904 | | 3906 |
| 116 | VG9B434 | GGSISNYY | IYSSGIT | AGIVGVKGAFAI | SSDVGGYNY | EVS | SSYTSTSVV |
| | | 3935 | 3936 | 3937 | 3938 | | 3940 |
| 117 | VG9B460 | GGSISNYY | IYSSGIT | AGIVGVKGAFAI | SSDVGGYNY | EVS | SSYTSTSVV |
| | | 3969 | 3970 | 3971 | 3972 | | 3974 |
| 118 | VG9B189 | GFTFSNHG | ITRGGDTT | TRGPLTVGYAMDY | SSDVGGYNY | EVS | NSYAGSNNFEV |
| | | 4003 | 4004 | 4005 | 4006 | | 4008 |
| 119 | VG9B452 | GGSISNYY | IYSSGIT | AGIVGVKGAFAI | SSDVGGYNY | EVS | SSYTSTSVV |
| | | 4037 | 4038 | 4039 | 4040 | | 4042 |
| 120 | VG9B53 | GGSISSYY | IHTIGSI | AMEGVGATNYYYGMAV | QSLLHSNGYNY | LGS | MQALQTPYT |
| | | 4071 | 4072 | 4073 | 4074 | | 4076 |
| 121 | VG9B41 | GYSFTTYW | IDPSDSET | ASNRWLLG | QSLVHSDGNTY | KIS | VQTREFPLT |
| | | 4105 | 4106 | 4107 | 4108 | | 4110 |
| 122 | VG9B136 | GDSVSSNRAA | TYYRSKWYN | ARDLWELREACDI | QGISSY | VAS | QQLNSYPFT |
| | | 4139 | 4140 | 4141 | 4142 | | 4144 |
| 123 | VG9B399 | GFTFSNYD | ISSSSSYI | ARDVGVTTDYYYYGMDV | QSVASSY | GAS | QQYGSSPPYT |
| | | 4173 | 4174 | 4175 | 4176 | | 4178 |
| 124 | VG9B369 | GFSLSTIGVG | IYWNDDK | AHSHDWVHAFDI | QDISHY | DAS | QQYDNFPLT |
| | | 4207 | 4208 | 4209 | 4210 | | 4212 |
| 125 | VG9B144 | GYTFTGYY | INPNSGAT | AREDDAFDV | NLRNYY | GKN | NSRDSSGNHVV |
| | | 4241 | 4242 | 4243 | 4244 | | 4246 |
| 126 | VG9B410 | GFTFSNYG | ISSGSSYK | ARDPVVTEYYYYGMDV | QGINSW | AAS | QQANSFPWT |
| | | 4275 | 4276 | 4277 | 4278 | | 4280 |
| 127 | VG9B386 | GFTFSSYS | IGSSSTYI | ARDGETGGFDY | QSISRSY | GPS | QQYGSLPLT |
| | | 4309 | 4310 | 4311 | 4312 | | 4314 |
| 128 | VG9B125 | GFTFSSYD | ISSSSTAK | AREDIVVVTPILQH | QSVSKD | DAS | QQRINWPLFT |
| | | 4343 | 4344 | 4345 | 4346 | | 4348 |
| 129 | VG9B112 | GDSVSSNSAA | TYYRSKWFN | ARGEWGLRDAFDI | QGIHSY | VAS | QQLNSYPWT |
| | | 4377 | 4378 | 4379 | 4380 | | 4382 |
| 130 | VG9B371 | RFTLSSYD | ISSSSSYI | ARDRGVGGTDYYYYGLDV | QSVSSSY | GAS | QQYGSSPPYT |
| | | 4411 | 4412 | 4413 | 4414 | | 4416 |
| 131 | VG9B387 | GFTFTGYY | INPNSGYT | ARLDDAFDV | SLRNYY | GKN | NSRDSSGNHWV |
| | | 4445 | 4446 | 4447 | 4448 | | 4450 |
| 132 | VG9B47 | GGSFSNYA | IIPFFGTP | STGGGYGDYDYYYGINV | QSLVHSDGNTY | KIS | MQAKEFPLT |
| | | 4479 | 4480 | 4481 | 4482 | | 4484 |
| 133 | VG9B379 | GYTFTGDY | INPNSGGT | AREGGVAPAAPDAFDI | SLRSYY | GKN | NSRDSSGNHRV |
| | | 4513 | 4514 | 4515 | 4516 | | 4518 |
| 134 | VG9B447 | GGSISNYY | IYSSGIT | AGIVGVKGAFAI | SSDVGGYNY | EVS | SSYTSTSVV |
| | | 4547 | 4548 | 4549 | 4550 | | 4552 |
| 135 | VG9B392 | GYTFTGYY | INPNSGYT | AREDDAFDI | SLRSYY | GKN | NSRDNSGNHVV |
| | | 4581 | 4582 | 4583 | 4584 | | 4586 |
| 136 | VG9B96 | GGTFSNYA | IIPIFSAG | SSNSGTYYDYYYGMDV | QSLVHSDGNTY | KIF | MQAKQFPLT |
| | | 4615 | 4616 | 4617 | 4618 | | 4620 |
| 137 | VG9B77 | GGTFSSYA | IIPFFGTA | ATATVTTDYYYGMDV | QSLVHSDGNTY | EIS | MQARQFPLT |
| | | 4649 | 4650 | 4651 | 4652 | | 4654 |

[0662] Variable Region Cloning. Both RNA purified by QIAGEN kit (RNEASY Plus Mini Kit) and B cells lysate were used for cDNA synthesis using the Smarter cDNA synthesis kit (Clontech, Mount View, CA). To facilitate cDNA synthesis, oligodT was used to prime reverse transcription of all messenger RNAs followed by “5′ capping” with a Smarter IIA oligonucleotide. Subsequent amplification of the VH and VL fragments was performed using a two-step PCR amplification using 5′ primers targeting the SMARTER IIA cap and 3′ primers targeting consensus regions in CH1. Briefly, each 50 μl PCR reaction consists of 20 pM of forward and reverse primer mixes, 25 μl of PRIMIESTAR MAX DNA polymerase premix (Clontech), 2 μl of unpurified cDNA, and 21 μl of double-distilled H2O. The cycling program started at 94° C. for 3 min., followed by 35 cycles (94° C. for 30 sec., 55° C. for 1 min., 68° C. for 1 min.), and ended at 72° C. for 7 min. The second round PCR was performed with VL and VH second round primers containing 15 bp complementary extensions that “overlap” respective regions in their respective Lonza mother vector (VH and VL). Second round PCR was performed with the following program: 94° C. for 3 min.; 35 cycles (94° C. for 30 sec., 55° C. for 1 min., 68° C. for 1 min.), and ended at 72° C. for 7 min. IN-FUSION® HD Cloning Kit (Clonetech, U.S.A.) was used for directional cloning of VL gene into Lonza huIgK or Lambda vector and VH gene into Lonza huIgG1 vector. To facilitate IN-FUSION® HD Cloning, PCR products were treated with Cloning Enhancer before IN-FUSION HD Cloning. Cloning and transformation were performed according to manufacturer's protocol (Clonetech, U.S.A.). Mini-prep DNAs were subjected to Sanger sequencing to confirm that complete V-gene fragments were obtained.

### 1.3 Binding Activity of TRGV9, TRDV2 and TRGDC Antibodies on Target Cell Lines.

[0663] Binding of antibodies to human γδ T cells or SKW cell lines expressing Vγ9/Vδ2, Vγ9/Vδ2 or Vγ5/Vδ2 was carried out by flow cytometry. Briefly, the cells were centrifuged at 300×g for 5 minutes and the pellet was resuspended in 34 ml fresh media (in RPMI+10% FBS). 50 μL of the cells were then plated (44K cells/well) into assay plates. Samples were incubated for one hour at 37° C. in tissue culture (TC) incubator followed by wash steps by adding 100 μl FACS staining buffer. Secondary detention antibodies (A647 conjugated anti-human IgG Fc specific antibody (2 pg/mL) along with AF488 anti mouse CD3, clone OKT3 at 1 μg/mL) were added at 50 μL/well to appropriate wells according to the plate map. After incubating for 60 minutes at 37° C. in the TC incubator, cells were again washed as described above. This is followed by resuspension in 20 μL/well running buffer containing 1:1000 dilution of Sytox blue dead cell stain and the plates were run on iQue Screener.

[0664] Gating and data analysis: Human ant-human Vγ9 antibody (VG9B2 mAb at 10 nM) was used to mark the gating of positive population. All cells were first gated for singlets on SCS-A vs. SCS-H dot plot, live/dead followed by CD3 positive population, and this subset of CD3 positive population was gated for Vγ9 positive binding using positive control mAb. Cells were also assessed for cell binding of control mAbs by RL1 (A647) Geomeans from the live cell population. Advanced metrics were used and normalization metrics were chosen to calculate fold over background wells containing secondary antibody alone (designated as ‘background’ within ForeCyt settings). The results were exported to GeneData screener to graph and summarize results, which are shown in Table 8.

TABLE 8
Antibody Binding

| | | | | SKW-Cell Lines | | |
|---|---|---|---|---|---|---|
| | | | | DRC Binding | DRC Binding | DRC Binding |
| | | | | Flow 37° C.: | Flow 37° C.: | Flow 37° C.: |
| | | | Human | AG000003284 | AG000003287 | AG000003285 |
| | | | γδ T cells | (SKW3_4 | (SKW3 | (SKW3 |
| | | | DRC Binding | expressing | expressing | expressing |
| | | | Flow 37° C.: | Vg9/Vd2) | Vg9/Vd1) | Vg5/Vd2) |
| | | | AG000003021 | [CLI000001324 | [CLI000001326 | [CLI000001325 |
| | Protein | | (γδ T cells) | (C3819A)] | (C3821A)] | (C3820A)] |
| # | Name | Specificity | Max. Activity | Max. Activity | Max. Activity | Max. Activity |
| 1 | VG9B54 | Vg9 | 4287.92 | 165.54 | 348.47 | 2.49 |
| 2 | VG9B121 | Vg9 | 3666.93 | 160.56 | 360.43 | 18.44 |
| 3 | VG9B429 | Vg9 | 3637.59 | 177.29 | 420.69 | 1.76 |
| 4 | VG9B370 | Vg9 | 3529.08 | 183.63 | 424.06 | 2.63 |
| 5 | VG9B80 | Vg9 | 3480.37 | 133.20 | 313.72 | 2.24 |
| 6 | VG9B414 | Vg9 | 3295.02 | 195.62 | 498.04 | 10.02 |
| 7 | VG9B195 | Vg9 | 3257.31 | 119.35 | 299.67 | 10.31 |
| 8 | VG9B140 | Vg9 | 3226.11 | 133.46 | 325.32 | 2.78 |
| 9 | VG9B426 | Vg9 | 3212.79 | 154.44 | 339.73 | 2.40 |
| 10 | VG9B46 | Vg9 | 3207.94 | 164.92 | 349.12 | 1.95 |
| 11 | VG9B416 | Vg9 | 3122.34 | 180.59 | 420.36 | 1.91 |
| 12 | VG9B69 | Vg9 | 3109.88 | 147.17 | 341.06 | 3.35 |
| 13 | VG9B415 | Vg9 | 3077.36 | 173.88 | 411.15 | 2.66 |
| 14 | VG9B104 | Vg9 | 3052.98 | 147.85 | 358.46 | 1.90 |
| 15 | VG9B198 | Vg9 | 3042.49 | 160.00 | 372.45 | 1.89 |
| 16 | VG9B463 | Vg9 | 3032.24 | 144.29 | 321.13 | 4.19 |
| 17 | VG9B469 | Vg9 | 3003.65 | 168.31 | 399.44 | 1.44 |
| 18 | VG9B428 | Vg9 | 2984.79 | 162.05 | 346.00 | 2.86 |
| 19 | VG9B430 | Vg9 | 2965.48 | 142.74 | 324.73 | 1.49 |
| 20 | VG9B423 | Vg9 | 2963.87 | 155.60 | 344.61 | 2.87 |
| 21 | VG9B98 | Vg9 | 2879.14 | 153.54 | 343.86 | 2.47 |
| 22 | VG9B73 | Vg9 | 2844.52 | 117.98 | 317.45 | 1.79 |
| 23 | VG9B133 | Vg9 | 2835.38 | 143.97 | 307.41 | 5.97 |
| 24 | VG9B368 | Vg9 | 2784.27 | 185.70 | 398.79 | 3.23 |
| 25 | VG9B424 | Vg9 | 2782.65 | 154.63 | 341.58 | 19.79 |
| 26 | VG9B427 | Vg9 | 2728.10 | 151.51 | 344.45 | 1.82 |
| 27 | VG9B417 | Vg9 | 2698.70 | 169.62 | 424.38 | 2.15 |
| 28 | VG9B58 | Vg9 | 2694.07 | 159.70 | 350.03 | 1.49 |
| 29 | VG9B419 | Vg9 | 2689.29 | 171.96 | 400.28 | 1.87 |
| 30 | VG9B425 | Vg9 | 2664.04 | 155.86 | 368.27 | 1.87 |
| 31 | VG9B143 | Vg9 | 2629.19 | 97.35 | 241.41 | 1.07 |
| 32 | VG9B418 | Vg9 | 2625.01 | 190.37 | 397.53 | 3.80 |
| 33 | VG9B472 | Vg9 | 2618.27 | 171.46 | 327.75 | 2.22 |
| 34 | VG9B421 | Vg9 | 2613.21 | 164.91 | 357.78 | 2.16 |
| 35 | VG9B88 | Vg9 | 2559.14 | 153.54 | 345.70 | 18.78 |
| 36 | VG9B384 | Vg9 | 2546.76 | 120.75 | 289.57 | 18.67 |
| 37 | VG9B413 | Vg9 | 2472.53 | 184.38 | 405.73 | 4.47 |
| 38 | VG9B36 | Vg9 | 2411.74 | 156.79 | 354.36 | 2.45 |
| 39 | VG9B403 | Vg9 | 2388.25 | 192.50 | 426.04 | 2.43 |
| 40 | VG9B191 | Vg9 | 2366.62 | 155.61 | 381.04 | 17.18 |
| 41 | VG9B44 | Vg9 | 2317.34 | 169.68 | 375.29 | 2.13 |
| 42 | VG9B67 | Vg9 | 2267.90 | 128.38 | 317.80 | 1.14 |
| 43 | VG9B402 | Vg9 | 2245.94 | 175.93 | 390.71 | 2.50 |
| 44 | VG9B127 | Vg9 | 2225.81 | 91.86 | 317.54 | 1.78 |
| 45 | VG9B137 | Vg9 | 2199.84 | 133.26 | 316.80 | 1.84 |
| 46 | VG9B33 | Vg9 | 2093.60 | 173.44 | 377.35 | 2.85 |
| 47 | VG9B162 | Vg9 | 1855.16 | 96.27 | 249.35 | 2.44 |
| 48 | VG9B152 | Vg9 | 1851.56 | 140.95 | 351.66 | 1.64 |
| 49 | VG9B64 | Vg9 | 1688.57 | 100.31 | 259.64 | 2.22 |
| 50 | VG9B21 | Vg9 | 1672.33 | 39.71 | 121.09 | 1.86 |
| 51 | VG9B128 | Vg9 | 1483.38 | 120.69 | 215.26 | 11.39 |
| 52 | VG9B66 | Vg9 | 1223.28 | 33.87 | 179.02 | 1.04 |
| 53 | VG9B32 | Vg9 | 1211.08 | 40.02 | 108.12 | 2.52 |
| 54 | VG9B57 | Vg9 | 1206.73 | 30.76 | 75.94 | 1.04 |
| 55 | VG9B135 | Vg9 | 577.24 | 15.10 | 59.87 | 2.65 |
| 56 | VG9B60 | Vg9 | 567.17 | 16.70 | 40.58 | 1.42 |
| 57 | VG9B409 | Vg9 | 410.62 | 176.35 | 408.24 | 8.45 |
| 58 | VG9B411 | Vg9 | 396.41 | 19.12 | 24.89 | 2.76 |
| 59 | VG9B129 | Vg9 | 271.32 | 10.36 | 23.35 | 1.13 |
| 60 | VG9B396 | Vd2 | 4543.78 | 154.68 | 2.19 | 222.19 |
| 61 | VG9B470 | Vd2 | 4273.42 | 166.74 | 1.59 | 231.07 |
| 62 | VG9B111 | Vd2 | 3433.67 | 116.94 | 1.92 | 154.43 |
| 63 | VG9B169 | Vd2 | 3246.37 | 165.28 | 2.21 | 175.26 |
| 64 | VG9B639 | Vd2 | 3236.63 | 155.28 | 1.29 | 185.68 |
| 65 | VG9B201 | Vd2 | 3170.12 | 152.35 | 2.74 | 204.61 |
| 66 | VG9B161 | Vd2 | 2819.85 | 180.14 | 1.43 | 210.72 |
| 67 | VG9B383 | Vd2 | 2778.28 | 183.98 | 1.36 | 283.96 |
| 68 | VG9B382 | Vd2 | 2775.57 | 176.98 | 1.04 | 275.40 |
| 69 | VG9B156 | Vd2 | 2698.68 | 152.58 | 1.60 | 169.64 |
| 70 | VG9B205 | Vd2 | 2689.76 | 153.49 | 2.04 | 161.98 |
| 71 | VG9B86 | Vd2 | 2670.16 | 137.94 | 1.16 | 206.91 |
| 72 | VG9B154 | Vd2 | 2592.95 | 152.88 | 1.09 | 92.70 |
| 73 | VG9B159 | Vd2 | 2505.10 | 123.26 | 1.58 | 11.37 |
| 74 | VG9B465 | Vd2 | 2500.83 | 148.03 | 7.28 | 214.03 |
| 75 | VG9B194 | Vd2 | 2470.37 | 151.47 | 6.29 | 148.31 |
| 76 | VG9B182 | Vd2 | 2365.20 | 159.31 | 1.68 | 195.27 |
| 77 | VG9B173 | Vd2 | 2362.86 | 181.80 | 1.82 | 25.36 |
| 78 | VG9B87 | Vd2 | 2331.26 | 138.98 | 1.40 | 51.63 |
| 79 | VG9B208 | Vd2 | 2306.11 | 176.93 | 2.15 | 203.33 |
| 80 | VG9B372 | Vd2 | 2293.95 | 127.30 | 1.02 | 171.26 |
| 81 | VG9B186 | Vd2 | 2287.42 | 142.50 | 1.20 | 66.88 |
| 82 | VG9B177 | Vd2 | 2247.18 | 161.00 | 1.28 | 192.81 |
| 83 | VG9B114 | Vd2 | 1975.60 | 176.44 | 8.38 | 226.28 |
| 84 | VG9B147 | Vd2 | 1890.32 | 30.48 | 1.59 | 69.75 |
| 85 | VG9B65 | Vd2 | 1819.09 | 88.75 | 8.50 | 122.51 |
| 86 | VG9B81 | Vd2 | 1771.18 | 42.23 | 1.17 | 77.02 |
| 87 | VG9B203 | Vd2 | 1753.37 | 143.32 | 1.30 | 193.78 |
| 88 | VG9B380 | Vd2 | 1749.32 | 163.87 | 11.60 | 232.97 |
| 89 | VG9B103 | Vd2 | 1675.38 | 96.41 | 1.79 | 236.84 |
| 90 | VG9B462 | Vd2 | 1541.64 | 140.24 | 21.55 | 141.65 |
| 91 | VG9B461 | Vd2 | 1539.12 | 148.91 | 9.04 | 153.18 |
| 92 | VG9B106 | Vd2 | 1524.56 | 10.48 | 1.20 | 64.28 |
| 93 | VG9B115 | Vd2 | 1522.89 | 41.89 | 1.49 | 66.95 |
| 94 | VG9B27 | Vd2 | 1446.95 | 137.76 | 5.83 | 208.79 |
| 95 | VG9B458 | Vd2 | 1412.02 | 147.86 | 4.38 | 123.29 |
| 96 | VG9B131 | Vd2 | 1403.08 | 58.11 | 2.38 | 91.72 |
| 97 | VG9B163 | Vd2 | 1346.41 | 57.19 | 10.63 | 48.91 |
| 98 | VG9B454 | Vd2 | 1244.69 | 180.68 | 29.37 | 158.37 |
| 99 | VG9B439 | Vd2 | 1244.61 | 169.53 | 1.84 | 162.87 |
| 100 | VG9B68 | Vd2 | 1192.87 | 124.09 | 2.08 | 207.12 |
| 101 | VG9B449 | Vd2 | 1178.94 | 164.57 | 1.47 | 158.60 |
| 102 | VG9B204 | Vd2 | 1129.50 | 99.65 | 1.50 | 169.49 |
| 103 | VG9B459 | Vd2 | 1087.45 | 156.84 | 7.55 | 137.62 |
| 104 | VG9B157 | Vd2 | 1070.92 | 10.96 | 0.96 | 11.69 |
| 105 | VG9B453 | Vd2 | 1037.24 | 171.23 | 1.69 | 162.89 |
| 106 | VG9B443 | Vd2 | 1005.02 | 171.26 | 5.90 | 150.44 |
| 107 | VG9B455 | Vd2 | 1000.40 | 169.15 | 1.33 | 153.89 |
| 108 | VG9B466 | Vd2 | 945.82 | 139.31 | 1.76 | 126.03 |
| 109 | VG9B450 | Vd2 | 927.78 | 167.57 | 1.13 | 159.63 |
| 110 | VG9B438 | Vd2 | 895.07 | 164.78 | 1.74 | 165.98 |
| 111 | VG9B464 | Vd2 | 886.16 | 145.74 | 1.73 | 115.48 |
| 112 | VG9B437 | Vd2 | 885.19 | 164.62 | 1.30 | 153.25 |
| 113 | VG9B457 | Vd2 | 864.60 | 179.57 | 0.93 | 157.79 |
| 114 | VG9B442 | Vd2 | 856.24 | 159.04 | 1.48 | 158.00 |
| 115 | VG9B436 | Vd2 | 812.47 | 162.02 | 1.88 | 169.69 |
| 116 | VG9B434 | Vd2 | 803.78 | 171.06 | 1.48 | 159.57 |
| 117 | VG9B460 | Vd2 | 767.37 | 138.23 | 1.47 | 129.82 |
| 118 | VG9B189 | Vd2 | 738.68 | 46.15 | 1.46 | 21.54 |
| 119 | VG9B452 | Vd2 | 686.75 | 181.12 | 2.10 | 166.55 |
| 120 | VG9B53 | Vd2 | 536.30 | 7.34 | 0.93 | 109.60 |
| 121 | VG9B41 | Vd2 | 137.19 | 11.43 | 2.18 | 16.08 |
| 122 | VG9B136 | g/d constant | 2684.58 | 180.54 | 288.27 | 226.18 |
| 123 | VG9B399 | g/d constant | 2478.03 | 214.03 | 435.82 | 206.50 |
| 124 | VG9B369 | g/d constant | 2429.10 | 258.91 | 319.93 | 241.30 |
| 125 | VG9B144 | g/d constant | 2425.86 | 123.44 | 204.70 | 193.74 |
| 126 | VG9B410 | g/d constant | 2253.41 | 222.69 | 434.89 | 54.42 |
| 127 | VG9B386 | g/d constant | 2113.79 | 210.54 | 388.92 | 92.74 |
| 128 | VG9B125 | g/d constant | 1992.68 | 126.84 | 277.32 | 194.19 |
| 129 | VG9B112 | g/d constant | 1991.02 | 227.15 | 328.28 | 217.02 |
| 130 | VG9B371 | g/d constant | 1970.39 | 225.19 | 430.68 | 130.30 |
| 131 | VG9B387 | g/d constant | 1965.44 | 200.61 | 434.64 | 261.40 |
| 132 | VG9B47 | g/d constant | 1558.28 | 162.35 | 308.26 | 211.59 |
| 133 | VG9B379 | g/d constant | 1458.49 | 160.15 | 294.95 | 260.37 |
| 134 | VG9B447 | g/d constant | 1417.79 | 196.00 | 94.00 | 161.41 |
| 135 | VG9B392 | g/d constant | 1247.94 | 154.25 | 295.22 | 281.15 |
| 136 | VG9B96 | g/d constant | 1022.01 | 126.04 | 244.90 | 223.89 |
| 137 | VG9B77 | g/d constant | 771.90 | 102.46 | 137.09 | 147.80 |

[0665] Cytokine and effector molecule analysis. Cytokines and effector molecules were assessed both intracellularly and in the cell culture supernatants. For intracellular cytokine and effector molecules assessment by flow cytometry, cells were initially surface stained with indicated monoclonal antibodies and washed twice with wash buffer. Stained cells were fixed and permeabilized using BD Fix/Perm kit (BD biosciences) per manufacturer's instructions. Permeabilized cells were probed with monoclonal antibodies against intracellular cytokines (TNFα, IFNγ) or effector molecules (Granzyme B) for 30 minutes at 4° C. Cells were washed twice and acquired on Novocyte flow cytometer. FMO (Fluorescence Minus One) controls were used to establish the gating for cytokines. For assessing cytokines in cell culture supernatant, cell culture supernatants were collected on indicated time points and subjected to quantification using customized human magnetic Luminex assay 15-plex kit (R&D Systems, Minneapolis, USA), as per the manufacturer's instructions. Quantification of the cytokines was carried out in MAGPIX multiplex detection system with xPONENT software. Results are shown in Table 9.

[0666] Activated T Cell Surface Marker Profiles. Flow cytometery was utilized to asses the percentage of Vγ9+ cells expressing certain T cell activation markers, including CD25 and CD71 expression, as well as the percentage of Vγ9 T cells in the cell population. Briefly, 48-well plates were coated with 200 μl of antibodies (1 pg/ml) and control antibody (VG7A5 1 μg/ml) in PBS overnight at 40° C. PBMCs were thawed and resuspended in RPMI+10% FBS media. They were then labeled with CTV dye to track proliferation. CTV labeled PBMCs were plated 2×10⁶ in 250 μl media per well of the antibody coated plates and incubated at 37° C. for 2 days. Supernatant was collected on day 2 for Luminex analysis (IFNγ, TNFα, Granzyme B). The cells were spun down and transferred to IL-2 containing media (100 IU/ml) and allowed to rest for 3 days followed by staining for CD25, CD71, IFNγ and Granzyme B after 3 days. The results are shown in Table 9.

TABLE 9
Cell Cytokine and Surface Marker Profiles

| | | | | | | Flow Staining | | |
|---|---|---|---|---|---|---|---|---|
| | Protein | Luninex (supernatant) | | | | CD25+ | CD71+ | Vg9 T |
| # | Name | TNFα | IL6 | IFNγ | Granzyme B | (Vg9+ cells) | (Vg9+ cells) | cell % |
| 1 | VG9B54 | 6096 | 761 | 1601 | 3103 | 32.4 | 93.3 | 10.5 |
| 2 | VG9B121 | 96 | 161 | 429 | 1352 | 50.9 | 98.7 | 16.1 |
| 3 | VG9B429 | 583 | 816 | 1249 | 2148 | 25.8 | 91.6 | 3.0 |
| 4 | VG9B370 | 2297 | 541 | 2839 | 5023 | 44.9 | 98.6 | 8.0 |
| 5 | VG9B80 | 4914 | 385 | 1364 | 3009 | 49.6 | 98.3 | 5.2 |
| 6 | VG9B414 | 186 | 219 | 476 | 1489 | 24.8 | 88.1 | 4.0 |
| 7 | VG9B195 | 61 | 166 | 303 | 1064 | 15.8 | 86.9 | 3.7 |
| 8 | VG9B140 | 3517 | 602 | 796 | 2161 | 20.4 | 70.6 | 3.9 |
| 9 | VG9B426 | 789 | 621 | 2348 | 4586 | 36.5 | 98.8 | 7.6 |
| 10 | VG9B46 | 5256 | 375 | 1154 | 3174 | 37.9 | 95.8 | 4.4 |
| 11 | VG9B416 | 87 | 225 | 1175 | 3390 | 46.4 | 98.8 | 13.9 |
| 12 | VG9B69 | 1099 | 591 | 2070 | 3238 | 40.4 | 97.7 | 8.8 |
| 13 | VG9B415 | 193 | 403 | 1213 | 5157 | 31.5 | 96.9 | 5.3 |
| 14 | VG9B104 | 4132 | 1092 | 2441 | 5290 | 41.4 | 95.2 | 5.1 |
| 15 | VG9B198 | 66 | 199 | 324 | 1103 | 23.0 | 91.2 | 3.6 |
| 16 | VG9B463 | 2109 | 100 | 364 | 965 | 26.0 | 87.4 | 4.1 |
| 17 | VG9B469 | 173 | 440 | 1585 | 3696 | 29.9 | 98.5 | 7.8 |
| 18 | VG9B428 | 390 | 613 | 1995 | 4125 | 37.0 | 98.1 | 5.0 |
| 19 | VG9B430 | 125 | 372 | 1491 | 2515 | 37.5 | 96.2 | 10.7 |
| 20 | VG9B423 | 229 | 590 | 1432 | 3376 | 40.3 | 98.9 | 13.9 |
| 21 | VG9B98 | 2007 | 294 | 305 | 1424 | 29.4 | 90.5 | 7.2 |
| 22 | VG9B73 | 136 | 359 | 1051 | 3372 | 30.6 | 94.1 | 13.8 |
| 23 | VG9B133 | 123 | 478 | 1167 | 3475 | 21.8 | 91.4 | 5.8 |
| 24 | VG9B368 | 118 | 260 | 1484 | 3314 | 42.3 | 98.2 | 11.5 |
| 25 | VG9B424 | 174 | 931 | 1405 | 3964 | 36.7 | 98.8 | 12.1 |
| 26 | VG9B427 | 220 | 340 | 2487 | 4676 | 50.6 | 99.1 | 13.6 |
| 27 | VG9B417 | 202 | 1409 | 2873 | 5568 | 49.6 | 98.8 | 10.9 |
| 28 | VG9B58 | 3454 | 572 | 1599 | 3839 | 33.9 | 91.8 | 6.8 |
| 29 | VG9B419 | 216 | 362 | 2429 | 4250 | 34.2 | 98.1 | 5.0 |
| 30 | VG9B425 | 127 | 612 | 1356 | 3740 | 39.3 | 98.6 | 15.6 |
| 31 | VG9B143 | 32 | 113 | 155 | 1086 | 11.4 | 87.5 | 6.2 |
| 32 | VG9B418 | 163 | 279 | 2182 | 3886 | 46.9 | 99.2 | 13.3 |
| 33 | VG9B472 | 84 | 394 | 575 | 2780 | 23.4 | 96.6 | 6.3 |
| 34 | VG9B421 | 255 | 604 | 2454 | 6129 | 36.7 | 98.7 | 7.1 |
| 35 | VG9B88 | 1263 | 551 | 1531 | 2377 | 15.1 | 88.1 | 4.1 |
| 36 | VG9B384 | 3744 | 610 | 1099 | 2301 | 26.4 | 89.9 | 3.4 |
| 37 | VG9B413 | 229 | 1961 | 2830 | 5795 | 44.9 | 98.8 | 13.3 |
| 38 | VG9B36 | 188 | 607 | 2581 | 3893 | 29.1 | 89.4 | 7.8 |
| 39 | VG9B403 | 102 | 175 | 1388 | 3017 | 36.2 | 97.5 | 7.2 |
| 40 | VG9B191 | 7323 | 400 | 1385 | 3373 | 42.4 | 93.6 | 5.2 |
| 41 | VG9B44 | 198 | 587 | 1147 | 3031 | 45.4 | 98.8 | 14.4 |
| 42 | VG9B67 | 144 | 365 | 972 | 2553 | 28.5 | 87.4 | 14.0 |
| 43 | VG9B402 | 376 | 433 | 2367 | 4497 | 45.5 | 99.1 | 9.5 |
| 44 | VG9B127 | 709 | 348 | 1173 | 2453 | 37.3 | 96.5 | 11.2 |
| 45 | VG9B137 | 30 | 8 | 44 | 36 | 8.7 | 77.3 | 3.6 |
| 46 | VG9B33 | 85 | 240 | 749 | 1994 | 28.0 | 95.2 | 14.0 |
| 47 | VG9B162 | 329 | 54 | 57 | 481 | 9.7 | 70.3 | 2.7 |
| 48 | VG9B152 | 51 | 118 | 344 | 1060 | 8.1 | 81.9 | 3.0 |
| 49 | VG9B64 | 46 | 122 | 383 | 863 | 21.4 | 79.6 | 4.0 |
| 50 | VG9B21 | 3329 | 459 | 1660 | 3153 | 27.5 | 91.8 | 7.1 |
| 51 | VG9B128 | 3964 | 304 | 1242 | 4854 | 36.6 | 97.4 | 9.6 |
| 52 | VG9B66 | 405 | 145 | 162 | 470 | 25.4 | 84.6 | 3.8 |
| 53 | VG9B32 | 10 | 11 | 44 | 68 | 19.1 | 87.3 | 5.1 |
| 54 | VG9B57 | 349 | 147 | 29 | 468 | 17.1 | 77.4 | 4.0 |
| 55 | VG9B135 | 225 | 717 | 57 | 270 | 20.6 | 77.7 | 4.3 |
| 56 | VG9B60 | 2425 | 269 | 280 | 912 | 9.1 | 73.0 | 2.9 |
| 57 | VG9B409 | 190 | 194 | 195 | 585 | 18.7 | 80.6 | 3.2 |
| 58 | VG9B411 | 25 | 88 | 51 | 115 | 10.8 | 75.4 | 3.0 |
| 59 | VG9B129 | 192 | 94 | 36 | 305 | 16.4 | 73.4 | 3.6 |
| 60 | VG9B396 | 908 | 172 | 531 | 1388 | 44.7 | 92.7 | 2.7 |
| 61 | VG9B470 | 3659 | 554 | 828 | 2231 | 43.5 | 92.6 | 2.3 |
| 62 | VG9B111 | 42 | 32 | 44 | 98 | 27.8 | 84.4 | 8.8 |
| 63 | VG9B169 | 722 | 399 | 577 | 2381 | 30.3 | 95.3 | 2.0 |
| 64 | VG9B639 | 6081 | 755 | 1397 | 4289 | 37.8 | 94.7 | 4.3 |
| 65 | VG9B201 | 460 | 77 | 225 | 987 | 21.8 | 89.4 | 4.2 |
| 66 | VG9B161 | 1285 | 286 | 620 | 1671 | 31.3 | 94.5 | 5.4 |
| 67 | VG9B383 | 687 | 379 | 1242 | 6027 | 29.7 | 91.3 | 6.4 |
| 68 | VG9B382 | 49 | 46 | 440 | 1640 | 32.7 | 93.9 | 6.0 |
| 69 | VG9B156 | 14 | 37 | 44 | 493 | 27.5 | 93.7 | 6.4 |
| 70 | VG9B205 | 224 | 66 | 99 | 800 | 22.0 | 91.4 | 2.4 |
| 71 | VG9B86 | 2254 | 186 | 503 | 1052 | 27.4 | 94.1 | 4.7 |
| 72 | VG9B154 | 9 | 4 | 44 | 181 | 26.3 | 93.7 | 6.9 |
| 73 | VG9B159 | 17 | 42 | 44 | 711 | 10.3 | 85.7 | 3.5 |
| 74 | VG9B465 | 132 | 126 | 795 | 1472 | 28.7 | 94.0 | 3.6 |
| 75 | VG9B194 | 276 | 40 | 44 | 316 | 17.0 | 82.6 | 3.7 |
| 76 | VG9B182 | 1040 | 209 | 938 | 2180 | 37.9 | 91.0 | 2.5 |
| 77 | VG9B173 | 17 | 104 | 83 | 766 | 22.9 | 90.4 | 5.1 |
| 78 | VG9B87 | 674 | 117 | 154 | 652 | 32.9 | 94.5 | 4.5 |
| 79 | VG9B208 | 22 | 31 | 68 | 618 | 16.8 | 91.7 | 3.8 |
| 80 | VG9B372 | 73 | 105 | 149 | 828 | 11.2 | 89.3 | 4.0 |
| 81 | VG9B186 | 429 | 56 | 68 | 327 | 13.3 | 78.3 | 3.4 |
| 82 | VG9B177 | 99 | 117 | 60 | 768 | 22.8 | 88.6 | 2.4 |
| 83 | VG9B114 | 6999 | 731 | 1081 | 3901 | 53.7 | 98.3 | 9.7 |
| 84 | VG9B147 | 58 | 81 | 44 | 307 | 12.0 | 89.0 | 3.0 |
| 85 | VG9B65 | 42 | 190 | 179 | 1040 | 24.6 | 96.4 | 7.2 |
| 86 | VG9B81 | 1147 | 144 | 138 | 500 | 27.4 | 79.7 | 8.4 |
| 87 | VG9B203 | 22 | 30 | 44 | 525 | 19.0 | 90.2 | 4.5 |
| 88 | VG9B380 | 15 | 21 | 44 | 228 | 15.5 | 84.3 | 4.2 |
| 89 | VG9B103 | 4760 | 298 | 889 | 3212 | 46.6 | 96.4 | 5.0 |
| 90 | VG9B462 | 7463 | 819 | 1461 | 2639 | 28.5 | 83.6 | 2.7 |
| 91 | VG9B461 | 7904 | 748 | 1353 | 3166 | 34.4 | 85.3 | 2.7 |
| 92 | VG9B106 | 119 | 39 | 44 | 287 | 12.2 | 73.9 | 3.5 |
| 93 | VG9B115 | 204 | 104 | 44 | 186 | 26.8 | 83.5 | 3.5 |
| 94 | VG9B27 | 3537 | 274 | 1492 | 4123 | 35.4 | 92.6 | 4.0 |
| 95 | VG9B458 | 4324 | 384 | 1026 | 2230 | 27.6 | 84.5 | 3.1 |
| 96 | VG9B131 | 371 | 76 | 91 | 429 | 18.8 | 80.3 | 3.4 |
| 97 | VG9B163 | 9 | 5 | 44 | 41 | 9.7 | 75.9 | 3.7 |
| 98 | VG9B454 | 2063 | 458 | 1215 | 2475 | 39.9 | 92.7 | 5.0 |
| 99 | VG9B439 | 190 | 140 | 167 | 760 | 13.8 | 86.0 | 3.9 |
| 100 | VG9B68 | 6831 | 539 | 1544 | 4204 | 35.6 | 93.5 | 9.3 |
| 101 | VG9B449 | 266 | 131 | 256 | 1089 | 16.3 | 87.2 | 3.5 |
| 102 | VG9B204 | 3255 | 230 | 698 | 1878 | 31.8 | 91.4 | 4.3 |
| 103 | VG9B459 | 1589 | 409 | 1060 | 2322 | 24.2 | 86.6 | 2.9 |
| 104 | VG9B157 | 74 | 606 | 36 | 115 | 13.1 | 78.3 | 3.3 |
| 105 | VG9B453 | 5756 | 612 | 1670 | 3297 | 29.7 | 87.9 | 3.0 |
| 106 | VG9B443 | 5106 | 860 | 1174 | 2548 | 33.6 | 86.0 | 3.8 |
| 107 | VG9B455 | 7052 | 1576 | 2726 | 9278 | 24.2 | 77.3 | 2.6 |
| 108 | VG9B466 | 5870 | 558 | 1194 | 2375 | 21.7 | 84.6 | 2.6 |
| 109 | VG9B450 | 1510 | 293 | 560 | 1379 | 26.1 | 83.9 | 3.5 |
| 110 | VG9B438 | 1419 | 387 | 653 | 2365 | 28.2 | 86.4 | 4.2 |
| 111 | VG9B464 | 5479 | 392 | 1584 | 2486 | 26.6 | 86.2 | 3.3 |
| 112 | VG9B437 | 311 | 899 | 666 | 1489 | 20.4 | 85.4 | 3.7 |
| 113 | VG9B457 | 1201 | 1066 | 778 | 1836 | 24.0 | 83.2 | 3.4 |
| 114 | VG9B442 | 617 | 542 | 322 | 1306 | 18.4 | 82.0 | 3.9 |
| 115 | VG9B436 | 271 | 149 | 230 | 1080 | 21.5 | 87.0 | 3.9 |
| 116 | VG9B434 | 478 | 985 | 900 | 4803 | 20.5 | 85.3 | 4.2 |
| 117 | VG9B460 | 333 | 528 | 410 | 1252 | 18.5 | 88.0 | 3.2 |
| 118 | VG9B189 | 64 | 30 | 44 | 230 | 11.6 | 80.0 | 3.5 |
| 119 | VG9B452 | 1891 | 273 | 1037 | 1828 | 26.4 | 84.9 | 3.6 |
| 120 | VG9B53 | 9 | 17 | 44 | 125 | 10.8 | 81.4 | 3.7 |
| 121 | VG9B41 | 213 | 95 | 29 | 274 | 16.9 | 79.5 | 4.8 |
| 122 | VG9B136 | 192 | 279 | 560 | 1542 | 33.3 | 94.9 | 5.7 |
| 123 | VG9B399 | 157 | 511 | 2400 | 8239 | 36.8 | 96.5 | 7.0 |
| 124 | VG9B369 | 138 | 4897 | 1458 | 2633 | 27.1 | 92.4 | 6.1 |
| 125 | VG9B144 | 215 | 123 | 352 | 1762 | 20.6 | 89.6 | 3.8 |
| 126 | VG9B410 | 158 | 590 | 2119 | 4389 | 36.5 | 98.2 | 12.3 |
| 127 | VG9B386 | 89 | 228 | 846 | 2963 | 29.7 | 97.0 | 8.5 |
| 128 | VG9B125 | 959 | 587 | 1491 | 3755 | 24.8 | 70.8 | 12.4 |
| 129 | VG9B112 | 1255 | 256 | 461 | 1143 | 23.4 | 91.8 | 7.9 |
| 130 | VG9B371 | 4097 | 1555 | 4834 | 7484 | 42.3 | 98.4 | 8.2 |
| 131 | VG9B387 | 135 | 5196 | 746 | 1471 | 24.7 | 89.7 | 5.5 |
| 132 | VG9B47 | 73 | 293 | 383 | 1284 | 30.0 | 96.1 | 6.4 |
| 133 | VG9B379 | 258 | 465 | 710 | 2529 | 29.9 | 94.7 | 7.7 |
| 134 | VG9B447 | 1539 | 197 | 462 | 1303 | 23.3 | 84.6 | 3.4 |
| 135 | VG9B392 | 78 | 191 | 258 | 1548 | 21.2 | 96.5 | 7.6 |
| 136 | VG9B96 | 3808 | 4354 | 2690 | 7663 | 33.1 | 82.5 | 15.1 |
| 137 | VG9B77 | 195 | 864 | 787 | 4675 | 19.4 | 90.3 | 5.1 |

[0667] It will be appreciated by those skilled in the art that changes could be made to the embodiments described above without departing from the broad inventive concept thereof. It is understood, therefore, that this invention is not limited to the particular embodiments disclosed, but it is intended to cover modifications within the spirit and scope of the present invention as defined by the present description.

The application's sequence listing, which the Patent Office published only in electronic form, follows.

SEQUENCE LISTING (4660 sequences)

SEQ ID NO: 1 - protein, 5 aa, synthetic construct
  REGION 1..5: note = Description of Artificial Sequence: Synthetic peptide
SYSLT

SEQ ID NO: 2 - protein, 17 aa, synthetic construct
  REGION 1..17: note = Description of Artificial Sequence: Synthetic peptide
SISSSSSYIFYADSVKG

SEQ ID NO: 3 - protein, 9 aa, synthetic construct
  REGION 1..9: note = Description of Artificial Sequence: Synthetic peptide
DGELGPFDY

SEQ ID NO: 4 - protein, 12 aa, synthetic construct
  REGION 1..12: note = Description of Artificial Sequence: Synthetic peptide
RASQSVSSSYLA

SEQ ID NO: 5 - protein, 7 aa, synthetic construct
  REGION 1..7: note = Description of Artificial Sequence: Synthetic peptide
GASSRAT

SEQ ID NO: 6 - protein, 9 aa, synthetic construct
  REGION 1..9: note = Description of Artificial Sequence: Synthetic peptide
QQYGRSPLT

SEQ ID NO: 7 - protein, 7 aa, synthetic construct
  REGION 1..7: note = Description of Artificial Sequence: Synthetic peptide
GFAFSSY

SEQ ID NO: 8 - protein, 6 aa, synthetic construct
  REGION 1..6: note = Description of Artificial Sequence: Synthetic peptide
SSSSSY

SEQ ID NO: 9 - protein, 8 aa, synthetic construct
  REGION 1..8: note = Description of Artificial Sequence: Synthetic peptide
DGELGPFD

SEQ ID NO: 10 - protein, 8 aa, synthetic construct
  REGION 1..8: note = Description of Artificial Sequence: Synthetic peptide
SQSVSSSY

SEQ ID NO: 11 - skipped

SEQ ID NO: 12 - protein, 6 aa, synthetic construct
  REGION 1..6: note = Description of Artificial Sequence: Synthetic peptide
YGRSPL

SEQ ID NO: 13 - protein, 10 aa, synthetic construct
  REGION 1..10: note = Description of Artificial Sequence: Synthetic peptide
GFAFSSYSLT

SEQ ID NO: 14 - protein, 10 aa, synthetic construct
  REGION 1..10: note = Description of Artificial Sequence: Synthetic peptide
SISSSSSYIF

SEQ ID NO: 15 - protein, 9 aa, synthetic construct
  REGION 1..9: note = Description of Artificial Sequence: Synthetic peptide
DGELGPFDY

SEQ ID NO: 16 - protein, 12 aa, synthetic construct
  REGION 1..12: note = Description of Artificial Sequence: Synthetic peptide
RASQSVSSSYLA

SEQ ID NO: 17 - protein, 7 aa, synthetic construct
  REGION 1..7: note = Description of Artificial Sequence: Synthetic peptide
GASSRAT

SEQ ID NO: 18 - protein, 9 aa, synthetic construct
  REGION 1..9: note = Description of Artificial Sequence: Synthetic peptide
QQYGRSPLT

SEQ ID NO: 19 - protein, 6 aa, synthetic construct
  REGION 1..6: note = Description of Artificial Sequence: Synthetic peptide
SSYSLT

SEQ ID NO: 20 - protein, 13 aa, synthetic construct
  REGION 1..13: note = Description of Artificial Sequence: Synthetic peptide
WVSSISSSSSYIF

SEQ ID NO: 21 - protein, 10 aa, synthetic construct
  REGION 1..10: note = Description of Artificial Sequence: Synthetic peptide
ATDGELGPFD

SEQ ID NO: 22 - protein, 8 aa, synthetic construct
  REGION 1..8: note = Description of Artificial Sequence: Synthetic peptide
SSSYLAWF

SEQ ID NO: 23 - protein, 10 aa, synthetic construct
  REGION 1..10: note = Description of Artificial Sequence: Synthetic peptide
RLIYGASSRA

SEQ ID NO: 24 - protein, 8 aa, synthetic construct
  REGION 1..8: note = Description of Artificial Sequence: Synthetic peptide
QQYGRSPL

SEQ ID NO: 25 - protein, 8 aa, synthetic construct
  REGION 1..8: note = Description of Artificial Sequence: Synthetic peptide
GFAFSSYS

SEQ ID NO: 26 - protein, 8 aa, synthetic construct
  REGION 1..8: note = Description of Artificial Sequence: Synthetic peptide
ISSSSSYI

SEQ ID NO: 27 - protein, 11 aa, synthetic construct
  REGION 1..11: note = Description of Artificial Sequence: Synthetic peptide
ATDGELGPFDY

SEQ ID NO: 28 - protein, 7 aa, synthetic construct
  REGION 1..7: note = Description of Artificial Sequence: Synthetic peptide
QSVSSSY

SEQ ID NO: 29 - skipped

SEQ ID NO: 30 - protein, 9 aa, synthetic construct
  REGION 1..9: note = Description of Artificial Sequence: Synthetic peptide
QQYGRSPLT

SEQ ID NO: 31 - protein, 118 aa, synthetic construct
  REGION 1..118: note = Description of Artificial Sequence: Synthetic polypeptide
EVQLVESGGGLVKPGGSLRLSCAASGFAFSSYSLTWVRQAPGKGLEWVSSISSSSSYIFYADSVKGRFTISRDNAKNSLYLQMNSLRAEDTAVYYCATDGELGPFDYWGQGTTVTVSS

SEQ ID NO: 32 - protein, 108 aa, synthetic construct
  REGION 1..108: note = Description of Artificial Sequence: Synthetic polypeptide
EIVMTQSPGTLSLSPGERATLSCRASQSVSSSYLAWFQQKPGQAPRRLIYGASSRATGIPDRFSGSGSGTDFTLTISRLEPEDFAVYYCQQYGRSPLTFGGGTKVEIK

SEQ ID NO: 33 - protein, 448 aa, synthetic construct
  REGION 1..448: note = Description of Artificial Sequence: Synthetic polypeptide
EVQLVESGGGLVKPGGSLRLSCAASGFAFSSYSLTWVRQAPGKGLEWVSSISSSSSYIFYADSVKGRFTISRDNAKNSLYLQMNSLRAEDTAVYYCATDGELGPFDYWGQGTTVTVSSASTKGPSVFPLAPSSKSTSGGTAALGCLVKDYFPEPVTVSWNSGALTSGVHTFPAVLQSSGLYSLSSVVTVPSSSLGTQTYICNVNHKPSNTKVDKKVEPKSCDKTHTCPPCPAPELLGGPSVFLFPPKPKDTLMISRTPEVTCVVVDVSHEDPEVKFNWYVDGVEVHNAKTKPREEQYNSTYRVVSVLTVLHQDWLNGKEYKCKVSNKALPAPIEKTISKAKGQPREPQVYTLPPSREEMTKNQVSLTCLVKGFYPSDIAVEWESNGQPENNYKTTPPVLDSDGSFFLYSKLTVDKSRWQQGNVFSCSVMHEALHNHYTQKSLSLSPGK

SEQ ID NO: 34 - protein, 215 aa, synthetic construct
  REGION 1..215: note = Description of Artificial Sequence: Synthetic polypeptide
EIVMTQSPGTLSLSPGERATLSCRASQSVSSSYLAWFQQKPGQAPRRLIYGASSRATGIPDRFSGSGSGTDFTLTISRLEPEDFAVYYCQQYGRSPLTFGGGTKVEIKRTVAAPSVFIFPPSDEQLKSGTASVVCLLNNFYPREAKVQWKVDNALQSGNSQESVTEQDSKDSTYSLSSTLTLSKADYEKHKVYACEVTHQGLSSPVTKSFNRGEC

SEQ ID NO: 35 - protein, 5 aa, synthetic construct
  REGION 1..5: note = Description of Artificial Sequence: Synthetic peptide
DYAMD

SEQ ID NO: 36 - protein, 17 aa, synthetic construct
  REGION 1..17: note = Description of Artificial Sequence: Synthetic peptide
SISSTSNYIFYADSVKG

SEQ ID NO: 37 - protein, 12 aa, synthetic construct
  REGION 1..12: note = Description of Artificial Sequence: Synthetic peptide
SYNWNYGGAFDI

SEQ ID NO: 38 - protein, 12 aa, synthetic construct
  REGION 1..12: note = Description of Artificial Sequence: Synthetic peptide
RASQSVSSSYFA

SEQ ID NO: 39 - protein, 7 aa, synthetic construct
  REGION 1..7: note = Description of Artificial Sequence: Synthetic peptide
GASSRAT

SEQ ID NO: 40 - protein, 9 aa, synthetic construct
  REGION 1..9: note = Description of Artificial Sequence: Synthetic peptide
QQYGRSPLT

SEQ ID NO: 41 - protein, 7 aa, synthetic construct
  REGION 1..7: note = Description of Artificial Sequence: Synthetic peptide
GFTFSDY

SEQ ID NO: 42 - protein, 6 aa, synthetic construct
  REGION 1..6: note = Description of Artificial Sequence: Synthetic peptide
SSTSNY

SEQ ID NO: 43 - protein, 11 aa, synthetic construct
  REGION 1..11: note = Description of Artificial Sequence: Synthetic peptide
SYNWNYGGAFD

SEQ ID NO: 44 - protein, 8 aa, synthetic construct
  REGION 1..8: note = Description of Artificial Sequence: Synthetic peptide
SQSVSSSY

SEQ ID NO: 45 - skipped

SEQ ID NO: 46 - protein, 6 aa, synthetic construct
  REGION 1..6: note = Description of Artificial Sequence: Synthetic peptide
YGRSPL

SEQ ID NO: 47 - protein, 10 aa, synthetic construct
  REGION 1..10: note = Description of Artificial Sequence: Synthetic peptide
GFTFSDYAMD

SEQ ID NO: 48 - protein, 10 aa, synthetic construct
  REGION 1..10: note = Description of Artificial Sequence: Synthetic peptide
SISSTSNYIF

SEQ ID NO: 49 - protein, 12 aa, synthetic construct
  REGION 1..12: note = Description of Artificial Sequence: Synthetic peptide
SYNWNYGGAFDI

SEQ ID NO: 50 - protein, 12 aa, synthetic construct
  REGION 1..12: note = Description of Artificial Sequence: Synthetic peptide
RASQSVSSSYFA

SEQ ID NO: 51 - protein, 7 aa, synthetic construct
  REGION 1..7: note = Description of Artificial Sequence: Synthetic peptide
GASSRAT

SEQ ID NO: 52 - protein, 9 aa, synthetic construct
  REGION 1..9: note = Description of Artificial Sequence: Synthetic peptide
QQYGRSPLT

SEQ ID NO: 53 - protein, 6 aa, synthetic construct
  REGION 1..6: note = Description of Artificial Sequence: Synthetic peptide
SDYAMD

SEQ ID NO: 54 - protein, 13 aa, synthetic construct
  REGION 1..13: note = Description of Artificial Sequence: Synthetic peptide
WISSISSTSNYIF

SEQ ID NO: 55 - protein, 13 aa, synthetic construct
  REGION 1..13: note = Description of Artificial Sequence: Synthetic peptide
ANSYNWNYGGAFD

SEQ ID NO: 56 - protein, 8 aa, synthetic construct
  REGION 1..8: note = Description of Artificial Sequence: Synthetic peptide
SSSYFAWY

SEQ ID NO: 57 - protein, 10 aa, synthetic construct
  REGION 1..10: note = Description of Artificial Sequence: Synthetic peptide
LLIYGASSRA

SEQ ID NO: 58 - protein, 8 aa, synthetic construct
  REGION 1..8: note = Description of Artificial Sequence: Synthetic peptide
QQYGRSPL

SEQ ID NO: 59 - protein, 8 aa, synthetic construct
  REGION 1..8: note = Description of Artificial Sequence: Synthetic peptide
GFTFSDYA

SEQ ID NO: 60 - protein, 8 aa, synthetic construct
  REGION 1..8: note = Description of Artificial Sequence: Synthetic peptide
ISSTSNYI

SEQ ID NO: 61 - protein, 14 aa, synthetic construct
  REGION 1..14: note = Description of Artificial Sequence: Synthetic peptide
ANSYNWNYGGAFDI

SEQ ID NO: 62 - protein, 7 aa, synthetic construct
  REGION 1..7: note = Description of Artificial Sequence: Synthetic peptide
QSVSSSY

SEQ ID NO: 63 - skipped

SEQ ID NO: 64 - protein, 9 aa, synthetic construct
  REGION 1..9: note = Description of Artificial Sequence: Synthetic peptide
QQYGRSPLT

SEQ ID NO: 65 - protein, 121 aa, synthetic construct
  REGION 1..121: note = Description of Artificial Sequence: Synthetic polypeptide
EVQLVESGGGLVKPGGSLRLSCVASGFTFSDYAMDWVRQAPGKGLDWISSISSTSNYIFYADSVKGRFTISRDNAKNSLYLQMNSLRVEDSAVYYCANSYNWNYGGAFDIWGQGTMVTVSS

SEQ ID NO: 66 - protein, 108 aa, synthetic construct
  REGION 1..108: note = Description of Artificial Sequence: Synthetic polypeptide
DIQMTQSPGTLSSSPGERATLSCRASQSVSSSYFAWYQQKPGRAPRLLIYGASSRATGIPDRFSGSGSGTDFTLTISRLEPEDFAVYFCQQYGRSPLTFGGGTKVEIK

SEQ ID NO: 67 - protein, 451 aa, synthetic construct
  REGION 1..451: note = Description of Artificial Sequence: Synthetic polypeptide
EVQLVESGGGLVKPGGSLRLSCVASGFTFSDYAMDWVRQAPGKGLDWISSISSTSNYIFYADSVKGRFTISRDNAKNSLYLQMNSLRVEDSAVYYCANSYNWNYGGAFDIWGQGTMVTVSSASTKGPSVFPLAPSSKSTSGGTAALGCLVKDYFPEPVTVSWNSGALTSGVHTFPAVLQSSGLYSLSSVVTVPSSSLGTQTYICNVNHKPSNTKVDKKVEPKSCDKTHTCPPCPAPELLGGPSVFLFPPKPKDTLMISRTPEVTCVVVDVSHEDPEVKFNWYVDGVEVHNAKTKPREEQYNSTYRVVSVLTVLHQDWLNGKEYKCKVSNKALPAPIEKTISKAKGQPREPQVYTLPPSREEMTKNQVSLTCLVKGFYPSDIAVEWESNGQPENNYKTTPPVLDSDGSFFLYSKLTVDKSRWQQGNVFSCSVMHEALHNHYTQKSLSLSPGK

SEQ ID NO: 68 - protein, 215 aa, synthetic construct
  REGION 1..215: note = Description of Artificial Sequence: Synthetic polypeptide
DIQMTQSPGTLSSSPGERATLSCRASQSVSSSYFAWYQQKPGRAPRLLIYGASSRATGIPDRFSGSGSGTDFTLTISRLEPEDFAVYFCQQYGRSPLTFGGGTKVEIKRTVAAPSVFIFPPSDEQLKSGTASVVCLLNNFYPREAKVQWKVDNALQSGNSQESVTEQDSKDSTYSLSSTLTLSKADYEKHKVYACEVTHQGLSSPVTKSFNRGEC

SEQ ID NO: 69 - protein, 5 aa, synthetic construct
  REGION 1..5: note = Description of Artificial Sequence: Synthetic peptide
NYDMN

SEQ ID NO: 70 - protein, 17 aa, synthetic construct
  REGION 1..17: note = Description of Artificial Sequence: Synthetic peptide
SISSSSSYIYYADSVKG

SEQ ID NO: 71 - protein, 15 aa, synthetic construct
  REGION 1..15: note = Description of Artificial Sequence: Synthetic peptide
DVGVTTDYYYYGMDV

SEQ ID NO: 72 - protein, 11 aa, synthetic construct
  REGION 1..11: note = Description of Artificial Sequence: Synthetic peptide
RASQGINSWLA

SEQ ID NO: 73 - protein, 7 aa, synthetic construct
  REGION 1..7: note = Description of Artificial Sequence: Synthetic peptide
AASSLQS

SEQ ID NO: 74 - protein, 9 aa, synthetic construct
  REGION 1..9: note = Description of Artificial Sequence: Synthetic peptide
QQANSFPWT

SEQ ID NO: 75 - protein, 7 aa, synthetic construct
  REGION 1..7: note = Description of Artificial Sequence: Synthetic peptide
GFTFSNY

SEQ ID NO: 76 - protein, 6 aa, synthetic construct
  REGION 1..6: note = Description of Artificial Sequence: Synthetic peptide
SSSSSY

SEQ ID NO: 77 - protein, 14 aa, synthetic construct
  REGION 1..14: note = Description of Artificial Sequence: Synthetic peptide
DVGVTTDYYYYGMD

SEQ ID NO: 78 - protein, 7 aa, synthetic construct
  REGION 1..7: note = Description of Artificial Sequence: Synthetic peptide
SQGINSW

SEQ ID NO: 79 - skipped

SEQ ID NO: 80 - protein, 6 aa, synthetic construct
  REGION 1..6: note = Description of Artificial Sequence: Synthetic peptide
ANSFPW

SEQ ID NO: 81 - protein, 10 aa, synthetic construct
  REGION 1..10: note = Description of Artificial Sequence: Synthetic peptide
GFTFSNYDMN

SEQ ID NO: 82 - protein, 10 aa, synthetic construct
  REGION 1..10: note = Description of Artificial Sequence: Synthetic peptide
SISSSSSYIY

SEQ ID NO: 83 - protein, 15 aa, synthetic construct
  REGION 1..15: note = Description of Artificial Sequence: Synthetic peptide
DVGVTTDYYYYGMDV

SEQ ID NO: 84 - protein, 11 aa, synthetic construct
  REGION 1..11: note = Description of Artificial Sequence: Synthetic peptide
RASQGINSWLA

SEQ ID NO: 85 - protein, 7 aa, synthetic construct
  REGION 1..7: note = Description of Artificial Sequence: Synthetic peptide
AASSLQS

SEQ ID NO: 86 - protein, 9 aa, synthetic construct
  REGION 1..9: note = Description of Artificial Sequence: Synthetic peptide
QQANSFPWT

SEQ ID NO: 87 - protein, 6 aa, synthetic construct
  REGION 1..6: note = Description of Artificial Sequence: Synthetic peptide
SNYDMN

SEQ ID NO: 88 - protein, 13 aa, synthetic construct
  REGION 1..13: note = Description of Artificial Sequence: Synthetic peptide
WVSSISSSSSYIY

SEQ ID NO: 89 - protein, 16 aa, synthetic construct
  REGION 1..16: note = Description of Artificial Sequence: Synthetic peptide
ARDVGVTTDYYYYGMD

SEQ ID NO: 90 - protein, 7 aa, synthetic construct
  REGION 1..7: note = Description of Artificial Sequence: Synthetic peptide
NSWLAWY

SEQ ID NO: 91 - protein, 10 aa, synthetic construct
  REGION 1..10: note = Description of Artificial Sequence: Synthetic peptide
LLIYAASSLQ

SEQ ID NO: 92 - protein, 8 aa, synthetic construct
  REGION 1..8: note = Description of Artificial Sequence: Synthetic peptide
QQANSFPW

SEQ ID NO: 93 - protein, 8 aa, synthetic construct
  REGION 1..8: note = Description of Artificial Sequence: Synthetic peptide
GFTFSNYD

SEQ ID NO: 94 - protein, 8 aa, synthetic construct
  REGION 1..8: note = Description of Artificial Sequence: Synthetic peptide
ISSSSSYI

SEQ ID NO: 95 - protein, 17 aa, synthetic construct
  REGION 1..17: note = Description of Artificial Sequence: Synthetic peptide
ARDVGVTTDYYYYGMDV

SEQ ID NO: 96 - protein, 6 aa, synthetic construct
  REGION 1..6: note = Description of Artificial Sequence: Synthetic peptide
QGINSW

SEQ ID NO: 97 - skipped

SEQ ID NO: 98 - protein, 9 aa, synthetic construct
  REGION 1..9: note = Description of Artificial Sequence: Synthetic peptide
QQANSFPWT

SEQ ID NO: 99 - protein, 124 aa, synthetic construct
  REGION 1..124: note = Description of Artificial Sequence: Synthetic polypeptide
QVQLVQSGGGLVKPGGSLRLSCSASGFTFSNYDMNWVRQAPGKGLEWVSSISSSSSYIYYADSVKGRFTISRDNAKNSLYLQMNSLRAEDTAVYHCARDVGVTTDYYYYGMDVWGQGTMVTVSS

SEQ ID NO: 100 - protein, 107 aa, synthetic construct
  REGION 1..107: note = Description of Artificial Sequence: Synthetic polypeptide
DIQMTQSPSSVSASVGDRVTITCRASQGINSWLAWYQQKPGNAPKLLIYAASSLQSGVPSRFSGIGSGTDFIFTISSLQPEDFASYYCQQANSFPWTFGQGTRLEIK

SEQ ID NO: 101 - protein, 454 aa, synthetic construct
  REGION 1..454: note = Description of Artificial Sequence: Synthetic polypeptide
QVQLVQSGGGLVKPGGSLRLSCSASGFTFSNYDMNWVRQAPGKGLEWVSSISSSSSYIYYADSVKGRFTISRDNAKNSLYLQMNSLRAEDTAVYHCARDVGVTTDYYYYGMDVWGQGTMVTVSSASTKGPSVFPLAPSSKSTSGGTAALGCLVKDYFPEPVTVSWNSGALTSGVHTFPAVLQSSGLYSLSSVVTVPSSSLGTQTYICNVNHKPSNTKVDKKVEPKSCDKTHTCPPCPAPELLGGPSVFLFPPKPKDTLMISRTPEVTCVVVDVSHEDPEVKFNWYVDGVEVHNAKTKPREEQYNSTYRVVSVLTVLHQDWLNGKEYKCKVSNKALPAPIEKTISKAKGQPREPQVYTLPPSREEMTKNQVSLTCLVKGFYPSDIAVEWESNGQPENNYKTTPPVLDSDGSFFLYSKLTVDKSRWQQGNVFSCSVMHEALHNHYTQKSLSLSPGK

SEQ ID NO: 102 - protein, 214 aa, synthetic construct
  REGION 1..214: note = Description of Artificial Sequence: Synthetic polypeptide
DIQMTQSPSSVSASVGDRVTITCRASQGINSWLAWYQQKPGNAPKLLIYAASSLQSGVPSRFSGIGSGTDFIFTISSLQPEDFASYYCQQANSFPWTFGQGTRLEIKRTVAAPSVFIFPPSDEQLKSGTASVVCLLNNFYPREAKVQWKVDNALQSGNSQESVTEQDSKDSTYSLSSTLTLSKADYEKHKVYACEVTHQGLSSPVTKSFNRGEC

SEQ ID NO: 103 - protein, 5 aa, synthetic construct
  REGION 1..5: note = Description of Artificial Sequence: Synthetic peptide
SYDMN

SEQ ID NO: 104 - protein, 17 aa, synthetic construct
  REGION 1..17: note = Description of Artificial Sequence: Synthetic peptide
SISSSSSYIYYADSVKG

SEQ ID NO: 105 - protein, 16 aa, synthetic construct
  REGION 1..16: note = Description of Artificial Sequence: Synthetic peptide
DRGVGGTDYYYYGLDV

SEQ ID NO: 106 - protein, 12 aa, synthetic construct
  REGION 1..12: note = Description of Artificial Sequence: Synthetic peptide
RASQSVSSSYLA

SEQ ID NO: 107 - protein, 7 aa, synthetic construct
  REGION 1..7: note = Description of Artificial Sequence: Synthetic peptide
GASSRAT

SEQ ID NO: 108 - protein, 10 aa, synthetic construct
  REGION 1..10: note = Description of Artificial Sequence: Synthetic peptide
QQYGSSPPYT

SEQ ID NO: 109 - protein, 7 aa, synthetic construct
  REGION 1..7: note = Description of Artificial Sequence: Synthetic peptide
RFTLSSY

SEQ ID NO: 110 - protein, 6 aa, synthetic construct
  REGION 1..6: note = Description of Artificial Sequence: Synthetic peptide
SSSSSY

SEQ ID NO: 111 - protein, 15 aa, synthetic construct
  REGION 1..15: note = Description of Artificial Sequence: Synthetic peptide
DRGVGGTDYYYYGLD

SEQ ID NO: 112 - protein, 8 aa, synthetic construct
  REGION 1..8: note = Description of Artificial Sequence: Synthetic peptide
SQSVSSSY

SEQ ID NO: 113 - skipped

SEQ ID NO: 114 - protein, 7 aa, synthetic construct
  REGION 1..7: note = Description of Artificial Sequence: Synthetic peptide
YGSSPPY

SEQ ID NO: 115 - protein, 10 aa, synthetic construct
  REGION 1..10: note = Description of Artificial Sequence: Synthetic peptide
RFTLSSYDMN

SEQ ID NO: 116 - protein, 10 aa, synthetic construct
  REGION 1..10: note = Description of Artificial Sequence: Synthetic peptide
SISSSSSYIY

SEQ ID NO: 117 - protein, 16 aa, synthetic construct
  REGION 1..16: note = Description of Artificial Sequence: Synthetic peptide
DRGVGGTDYYYYGLDV

SEQ ID NO: 118 - protein, 12 aa, synthetic construct
  REGION 1..12: note = Description of Artificial Sequence: Synthetic peptide
RASQSVSSSYLA

SEQ ID NO: 119 - protein, 7 aa, synthetic construct
  REGION 1..7: note = Description of Artificial Sequence: Synthetic peptide
GASSRAT

SEQ ID NO: 120 - protein, 10 aa, synthetic construct
  REGION 1..10: note = Description of Artificial Sequence: Synthetic peptide
QQYGSSPPYT

SEQ ID NO: 121 - protein, 6 aa, synthetic construct
  REGION 1..6: note = Description of Artificial Sequence: Synthetic peptide
SSYDMN

SEQ ID NO: 122 - protein, 13 aa, synthetic construct
  REGION 1..13: note = Description of Artificial Sequence: Synthetic peptide
WVSSISSSSSYIY

SEQ ID NO: 123 - protein, 17 aa, synthetic construct
  REGION 1..17: note = Description of Artificial Sequence: Synthetic peptide
ARDRGVGGTDYYYYGLD

SEQ ID NO: 124 - protein, 8 aa, synthetic construct
  REGION 1..8: note = Description of Artificial Sequence: Synthetic peptide
SSSYLAWY

SEQ ID NO: 125 - protein, 10 aa, synthetic construct
  REGION 1..10: note = Description of Artificial Sequence: Synthetic peptide
LLIYGASSRA

SEQ ID NO: 126 - protein, 9 aa, synthetic construct
  REGION 1..9: note = Description of Artificial Sequence: Synthetic peptide
QQYGSSPPY

SEQ ID NO: 127 - protein, 8 aa, synthetic construct
  REGION 1..8: note = Description of Artificial Sequence: Synthetic peptide
RFTLSSYD

SEQ ID NO: 128 - protein, 8 aa, synthetic construct
  REGION 1..8: note = Description of Artificial Sequence: Synthetic peptide
ISSSSSYI

SEQ ID NO: 129 - protein, 18 aa, synthetic construct
  REGION 1..18: note = Description of Artificial Sequence: Synthetic peptide
ARDRGVGGTDYYYYGLDV

SEQ ID NO: 130 - protein, 7 aa, synthetic construct
  REGION 1..7: note = Description of Artificial Sequence: Synthetic peptide
QSVSSSY

SEQ ID NO: 131 - skipped

SEQ ID NO: 132 - protein, 10 aa, synthetic construct
  REGION 1..10: note = Description of Artificial Sequence: Synthetic peptide
QQYGSSPPYT

SEQ ID NO: 133 - protein, 125 aa, synthetic construct
  REGION 1..125: note = Description of Artificial Sequence: Synthetic polypeptide
EVQLVESGGGLVKPGGSLRLSCAASRFTLSSYDMNWVRQAPGKGLEWVSSISSSSSYIYYADSVKGRFTISRDNAKNSLYLQMNSLRAEDTAVYYCARDRGVGGTDYYYYGLDVWGQGTTVTVSS

SEQ ID NO: 134 - protein, 109 aa, synthetic construct
  REGION 1..109: note = Description of Artificial Sequence: Synthetic polypeptide
EIVLTQSPGTLSLSPGERATLSCRASQSVSSSYLAWYQQKPGQAPRLLIYGASSRATGIPDRFSGSGSGTDFTLTISRLEPEDFAVYYCQQYGSSPPYTFGQGTKVEIK

SEQ ID NO: 135 - protein, 455 aa, synthetic construct
  REGION 1..455: note = Description of Artificial Sequence: Synthetic polypeptide
EVQLVESGGGLVKPGGSLRLSCAASRFTLSSYDMNWVRQAPGKGLEWVSSISSSSSYIYYADSVKGRFTISRDNAKNSLYLQMNSLRAEDTAVYYCARDRGVGGTDYYYYGLDVWGQGTTVTVSSASTKGPSVFPLAPSSKSTSGGTAALGCLVKDYFPEPVTVSWNSGALTSGVHTFPAVLQSSGLYSLSSVVTVPSSSLGTQTYICNVNHKPSNTKVDKKVEPKSCDKTHTCPPCPAPELLGGPSVFLFPPKPKDTLMISRTPEVTCVVVDVSHEDPEVKFNWYVDGVEVHNAKTKPREEQYNSTYRVVSVLTVLHQDWLNGKEYKCKVSNKALPAPIEKTISKAKGQPREPQVYTLPPSREEMTKNQVSLTCLVKGFYPSDIAVEWESNGQPENNYKTTPPVLDSDGSFFLYSKLTVDKSRWQQGNVFSCSVMHEALHNHYTQKSLSLSPGK

SEQ ID NO: 136 - protein, 216 aa, synthetic construct
  REGION 1..216: note = Description of Artificial Sequence: Synthetic polypeptide
EIVLTQSPGTLSLSPGERATLSCRASQSVSSSYLAWYQQKPGQAPRLLIYGASSRATGIPDRFSGSGSGTDFTLTISRLEPEDFAVYYCQQYGSSPPYTFGQGTKVEIKRTVAAPSVFIFPPSDEQLKSGTASVVCLLNNFYPREAKVQWKVDNALQSGNSQESVTEQDSKDSTYSLSSTLTLSKADYEKHKVYACEVTHQGLSSPVTKSFNRGEC

SEQ ID NO: 137 - protein, 5 aa, synthetic construct
  REGION 1..5: note = Description of Artificial Sequence: Synthetic peptide
TYSMN

SEQ ID NO: 138 - protein, 17 aa, synthetic construct
  REGION 1..17: note = Description of Artificial Sequence: Synthetic peptide
SISSSSSYIFYADSVKG

SEQ ID NO: 139 - protein, 9 aa, synthetic construct
  REGION 1..9: note = Description of Artificial Sequence: Synthetic peptide
DGELGVFDY

SEQ ID NO: 140 - protein, 12 aa, synthetic construct
  REGION 1..12: note = Description of Artificial Sequence: Synthetic peptide
RASQSISSSYLA

SEQ ID NO: 141 - protein, 7 aa, synthetic construct
  REGION 1..7: note = Description of Artificial Sequence: Synthetic peptide
GPSGRAT

SEQ ID NO: 142 - protein, 9 aa, synthetic construct
  REGION 1..9: note = Description of Artificial Sequence: Synthetic peptide
QQFGRSPLT

SEQ ID NO: 143 - protein, 7 aa, synthetic construct
  REGION 1..7: note = Description of Artificial Sequence: Synthetic peptide
GFTFSTY

SEQ ID NO: 144 - protein, 6 aa, synthetic construct
  REGION 1..6: note = Description of Artificial Sequence: Synthetic peptide
SSSSSY

SEQ ID NO: 145 - protein, 8 aa, synthetic construct
  REGION 1..8: note = Description of Artificial Sequence: Synthetic peptide
DGELGVFD

SEQ ID NO: 146 - protein, 8 aa, synthetic construct
  REGION 1..8: note = Description of Artificial Sequence: Synthetic peptide
SQSISSSY

SEQ ID NO: 147 - skipped

SEQ ID NO: 148 - protein, 6 aa, synthetic construct
  REGION 1..6: note = Description of Artificial Sequence: Synthetic peptide
FGRSPL

SEQ ID NO: 149 - protein, 10 aa, synthetic construct
  REGION 1..10: note = Description of Artificial Sequence: Synthetic peptide
GFTFSTYSMN

SEQ ID NO: 150 - protein, 10 aa, synthetic construct
  REGION 1..10: note = Description of Artificial Sequence: Synthetic peptide
SISSSSSYIF

SEQ ID NO: 151 - protein, 9 aa, synthetic construct
  REGION 1..9: note = Description of Artificial Sequence: Synthetic peptide
DGELGVFDY

SEQ ID NO: 152 - protein, 12 aa, synthetic construct
  REGION 1..12: note = Description of Artificial Sequence: Synthetic peptide
RASQSISSSYLA

SEQ ID NO: 153 - protein, 7 aa, synthetic construct
  REGION 1..7: note = Description of Artificial Sequence: Synthetic peptide
GPSGRAT

SEQ ID NO: 154 - protein, 9 aa, synthetic construct
  REGION 1..9: note = Description of Artificial Sequence: Synthetic peptide
QQFGRSPLT

SEQ ID NO: 155 - protein, 6 aa, synthetic construct
  REGION 1..6: note = Description of Artificial Sequence: Synthetic peptide
STYSMN

SEQ ID NO: 156 - protein, 13 aa, synthetic construct
  REGION 1..13: note = Description of Artificial Sequence: Synthetic peptide
WVSSISSSSSYIF

SEQ ID NO: 157 - protein, 10 aa, synthetic construct
  REGION 1..10: note = Description of Artificial Sequence: Synthetic peptide
AKDGELGVFD

SEQ ID NO: 158 - protein, 8 aa, synthetic construct
  REGION 1..8: note = Description of Artificial Sequence: Synthetic peptide
SSSYLAWY

SEQ ID NO: 159 - protein, 10 aa, synthetic construct
  REGION 1..10: note = Description of Artificial Sequence: Synthetic peptide
VLIYGPSGRA

SEQ ID NO: 160 - protein, 8 aa, synthetic construct
  REGION 1..8: note = Description of Artificial Sequence: Synthetic peptide
QQFGRSPL

SEQ ID NO: 161 - protein, 8 aa, synthetic construct
  REGION 1..8: note = Description of Artificial Sequence: Synthetic peptide
GFTFSTYS

SEQ ID NO: 162 - protein, 8 aa, synthetic construct
  REGION 1..8: note = Description of Artificial Sequence: Synthetic peptide
ISSSSSYI

SEQ ID NO: 163 - protein, 11 aa, synthetic construct
  REGION 1..11: note = Description of Artificial Sequence: Synthetic peptide
AKDGELGVFDY

SEQ ID NO: 164 - protein, 7 aa, synthetic construct
  REGION 1..7: note = Description of Artificial Sequence: Synthetic peptide
QSISSSY

SEQ ID NO: 165 - skipped

SEQ ID NO: 166 - protein, 9 aa, synthetic construct
  REGION 1..9: note = Description of Artificial Sequence: Synthetic peptide
QQFGRSPLT

SEQ ID NO: 167 - protein, 118 aa, synthetic construct
  REGION 1..118: note = Description of Artificial Sequence: Synthetic polypeptide
EVQLVQSGGGLVKSGGSLRLSCAASGFTFSTYSMNWVRQAPGKGLEWVSSISSSSSYIFYADSVKGRIIISRDNAKNSLYLQMNSVRADDTAVYYCAKDGELGVFDYWGQGTLVTVSS

SEQ ID NO: 168 - protein, 108 aa, synthetic construct
  REGION 1..108: note = Description of Artificial Sequence: Synthetic polypeptide
EIVLTQSPGTLSLSAGERATLSCRASQSISSSYLAWYQQKPGQAPRVLIYGPSGRATGIPDRFRGSGSGTDFTLTISRLEPEDFAVYYCQQFGRSPLTFGGGTKVEIK

SEQ ID NO: 169 - protein, 448 aa, synthetic construct
  REGION 1..448: note = Description of Artificial Sequence: Synthetic polypeptide
EVQLVQSGGGLVKSGGSLRLSCAASGFTFSTYSMNWVRQAPGKGLEWVSSISSSSSYIFYADSVKGRIIISRDNAKNSLYLQMNSVRADDTAVYYCAKDGELGVFDYWGQGTLVTVSSASTKGPSVFPLAPSSKSTSGGTAALGCLVKDYFPEPVTVSWNSGALTSGVHTFPAVLQSSGLYSLSSVVTVPSSSLGTQTYICNVNHKPSNTKVDKKVEPKSCDKTHTCPPCPAPELLGGPSVFLFPPKPKDTLMISRTPEVTCVVVDVSHEDPEVKFNWYVDGVEVHNAKTKPREEQYNSTYRVVSVLTVLHQDWLNGKEYKCKVSNKALPAPIEKTISKAKGQPREPQVYTLPPSREEMTKNQVSLTCLVKGFYPSDIAVEWESNGQPENNYKTTPPVLDSDGSFFLYSKLTVDKSRWQQGNVFSCSVMHEALHNHYTQKSLSLSPGK

SEQ ID NO: 170 - protein, 215 aa, synthetic construct
  REGION 1..215: note = Description of Artificial Sequence: Synthetic polypeptide
EIVLTQSPGTLSLSAGERATLSCRASQSISSSYLAWYQQKPGQAPRVLIYGPSGRATGIPDRFRGSGSGTDFTLTISRLEPEDFAVYYCQQFGRSPLTFGGGTKVEIKRTVAAPSVFIFPPSDEQLKSGTASVVCLLNNFYPREAKVQWKVDNALQSGNSQESVTEQDSKDSTYSLSSTLTLSKADYEKHKVYACEVTHQGLSSPVTKSFNRGEC

SEQ ID NO: 171 - protein, 5 aa, synthetic construct
  REGION 1..5: note = Description of Artificial Sequence: Synthetic peptide
NYDMN

SEQ ID NO: 172 - protein, 17 aa, synthetic construct
  REGION 1..17: note = Description of Artificial Sequence: Synthetic peptide
SISSSSSYIYYADSVKG

SEQ ID NO: 173 - protein, 15 aa, synthetic construct
  REGION 1..15: note = Description of Artificial Sequence: Synthetic peptide
DVGVTTDYYYYGMDV

SEQ ID NO: 174 - protein, 11 aa, synthetic construct
  REGION 1..11: note = Description of Artificial Sequence: Synthetic peptide
RASQGINSWLA

SEQ ID NO: 175 - protein, 7 aa, synthetic construct
  REGION 1..7: note = Description of Artificial Sequence: Synthetic peptide
AASSLQS

SEQ ID NO: 176 - protein, 9 aa, synthetic construct
  REGION 1..9: note = Description of Artificial Sequence: Synthetic peptide
QQANSFPWT

SEQ ID NO: 177 - protein, 7 aa, synthetic construct
  REGION 1..7: note = Description of Artificial Sequence: Synthetic peptide
GFTFSNY

SEQ ID NO: 178 - protein, 6 aa, synthetic construct
  REGION 1..6: note = Description of Artificial Sequence: Synthetic peptide
SSSSSY

SEQ ID NO: 179 - protein, 14 aa, synthetic construct
  REGION 1..14: note = Description of Artificial Sequence: Synthetic peptide
DVGVTTDYYYYGMD

SEQ ID NO: 180 - protein, 7 aa, synthetic construct
  REGION 1..7: note = Description of Artificial Sequence: Synthetic peptide
SQGINSW

SEQ ID NO: 181 - skipped

SEQ ID NO: 182 - protein, 6 aa, synthetic construct
  REGION 1..6: note = Description of Artificial Sequence: Synthetic peptide
ANSFPW

SEQ ID NO: 183 - protein, 10 aa, synthetic construct
  REGION 1..10: note = Description of Artificial Sequence: Synthetic peptide
GFTFSNYDMN

SEQ ID NO: 184 - protein, 10 aa, synthetic construct
  REGION 1..10: note = Description of Artificial Sequence: Synthetic peptide
SISSSSSYIY

SEQ ID NO: 185 - protein, 15 aa, synthetic construct
  REGION 1..15: note = Description of Artificial Sequence: Synthetic peptide
DVGVTTDYYYYGMDV

SEQ ID NO: 186 - protein, 11 aa, synthetic construct
  REGION 1..11: note = Description of Artificial Sequence: Synthetic peptide
RASQGINSWLA

SEQ ID NO: 187 - protein, 7 aa, synthetic construct
  REGION 1..7: note = Description of Artificial Sequence: Synthetic peptide
AASSLQS

SEQ ID NO: 188 - protein, 9 aa, synthetic construct
  REGION 1..9: note = Description of Artificial Sequence: Synthetic peptide
QQANSFPWT

SEQ ID NO: 189 - protein, 6 aa, synthetic construct
  REGION 1..6: note = Description of Artificial Sequence: Synthetic peptide
SNYDMN

SEQ ID NO: 190 - protein, 13 aa, synthetic construct
  REGION 1..13: note = Description of Artificial Sequence: Synthetic peptide
WVSSISSSSSYIY

SEQ ID NO: 191 - protein, 16 aa, synthetic construct
  REGION 1..16: note = Description of Artificial Sequence: Synthetic peptide
ARDVGVTTDYYYYGMD

SEQ ID NO: 192 - protein, 7 aa, synthetic construct
  REGION 1..7: note = Description of Artificial Sequence: Synthetic peptide
NSWLAWY

SEQ ID NO: 193 - protein, 10 aa, synthetic construct
  REGION 1..10: note = Description of Artificial Sequence: Synthetic peptide
LLIYAASSLQ

SEQ ID NO: 194 - protein, 8 aa, synthetic construct
  REGION 1..8: note = Description of Artificial Sequence: Synthetic peptide
QQANSFPW

SEQ ID NO: 195 - protein, 8 aa, synthetic construct
  REGION 1..8: note = Description of Artificial Sequence: Synthetic peptide
GFTFSNYD

SEQ ID NO: 196 - protein, 8 aa, synthetic construct
  REGION 1..8: note = Description of Artificial Sequence: Synthetic peptide
ISSSSSYI

SEQ ID NO: 197 - protein, 17 aa, synthetic construct
  REGION 1..17: note = Description of Artificial Sequence: Synthetic peptide
ARDVGVTTDYYYYGMDV

SEQ ID NO: 198 - protein, 6 aa, synthetic construct
  REGION 1..6: note = Description of Artificial Sequence: Synthetic peptide
QGINSW

SEQ ID NO: 199 - skipped

SEQ ID NO: 200 - protein, 9 aa, synthetic construct
  REGION 1..9: note = Description of Artificial Sequence: Synthetic peptide
QQANSFPWT

SEQ ID NO: 201 - protein, 124 aa, synthetic construct
  REGION 1..124: note = Description of Artificial Sequence: Synthetic polypeptide
EVQLVESGGGLVKPGGSLRLSCSASGFTFSNYDMNWVRQAPGKGLEWVSSISSSSSYIYYADSVKGRFTISRDNAKNSLYLQMNSLRAEDTAVYHCARDVGVTTDYYYYGMDVWGQGTMVTVSS

SEQ ID NO: 202 - protein, 107 aa, synthetic construct
  REGION 1..107: note = Description of Artificial Sequence: Synthetic polypeptide
EIVMTQSPSSVSASVGDRVTITCRASQGINSWLAWYQQKPGNAPKLLIYAASSLQSGVPSRFSGIGSGTDFIFTISSLQPEDFASYYCQQANSFPWTFGQGTRLEIK

SEQ ID NO: 203 - protein, 454 aa, synthetic construct
  REGION 1..454: note = Description of Artificial Sequence: Synthetic polypeptide
EVQLVESGGGLVKPGGSLRLSCSASGFTFSNYDMNWVRQAPGKGLEWVSSISSSSSYIYYADSVKGRFTISRDNAKNSLYLQMNSLRAEDTAVYHCARDVGVTTDYYYYGMDVWGQGTMVTVSSASTKGPSVFPLAPSSKSTSGGTAALGCLVKDYFPEPVTVSWNSGALTSGVHTFPAVLQSSGLYSLSSVVTVPSSSLGTQTYICNVNHKPSNTKVDKKVEPKSCDKTHTCPPCPAPELLGGPSVFLFPPKPKDTLMISRTPEVTCVVVDVSHEDPEVKFNWYVDGVEVHNAKTKPREEQYNSTYRVVSVLTVLHQDWLNGKEYKCKVSNKALPAPIEKTISKAKGQPREPQVYTLPPSREEMTKNQVSLTCLVKGFYPSDIAVEWESNGQPENNYKTTPPVLDSDGSFFLYSKLTVDKSRWQQGNVFSCSVMHEALHNHYTQKSLSLSPGK

SEQ ID NO: 204 - protein, 214 aa, synthetic construct
  REGION 1..214: note = Description of Artificial Sequence: Synthetic polypeptide
EIVMTQSPSSVSASVGDRVTITCRASQGINSWLAWYQQKPGNAPKLLIYAASSLQSGVPSRFSGIGSGTDFIFTISSLQPEDFASYYCQQANSFPWTFGQGTRLEIKRTVAAPSVFIFPPSDEQLKSGTASVVCLLNNFYPREAKVQWKVDNALQSGNSQESVTEQDSKDSTYSLSSTLTLSKADYEKHKVYACEVTHQGLSSPVTKSFNRGEC

SEQ ID NO: 205 - protein, 5 aa, synthetic construct
  REGION 1..5: note = Description of Artificial Sequence: Synthetic peptide
PYTMN

SEQ ID NO: 206 - protein, 17 aa, synthetic construct
  REGION 1..17: note = Description of Artificial Sequence: Synthetic peptide
SISSSSSYMYYADSVKG

SEQ ID NO: 207 - protein, 13 aa, synthetic construct
  REGION 1..13: note = Description of Artificial Sequence: Synthetic peptide
DGDLVGPTYYFDY

SEQ ID NO: 208 - protein, 11 aa, synthetic construct
  REGION 1..11: note = Description of Artificial Sequence: Synthetic peptide
SGDKLGDKYAC

SEQ ID NO: 209 - protein, 7 aa, synthetic construct
  REGION 1..7: note = Description of Artificial Sequence: Synthetic peptide
QHNKRPS

SEQ ID NO: 210 - protein, 9 aa, synthetic construct
  REGION 1..9: note = Description of Artificial Sequence: Synthetic peptide
QAWDSTTVV

SEQ ID NO: 211 - protein, 7 aa, synthetic construct
  REGION 1..7: note = Description of Artificial Sequence: Synthetic peptide
GFTFSPY

SEQ ID NO: 212 - protein, 6 aa, synthetic construct
  REGION 1..6: note = Description of Artificial Sequence: Synthetic peptide
SSSSSY

SEQ ID NO: 213 - protein, 12 aa, synthetic construct
  REGION 1..12: note = Description of Artificial Sequence: Synthetic peptide
DGDLVGPTYYFD

SEQ ID NO: 214 - protein, 7 aa, synthetic construct
  REGION 1..7: note = Description of Artificial Sequence: Synthetic peptide
DKLGDKY

SEQ ID NO: 215 - skipped

SEQ ID NO: 216 - protein, 6 aa, synthetic construct
  REGION 1..6: note = Description of Artificial Sequence: Synthetic peptide
WDSTTV

SEQ ID NO: 217 - protein, 10 aa, synthetic construct
  REGION 1..10: note = Description of Artificial Sequence: Synthetic peptide
GFTFSPYTMN

SEQ ID NO: 218 - protein, 10 aa, synthetic construct
  REGION 1..10: note = Description of Artificial Sequence: Synthetic peptide
SISSSSSYMY

SEQ ID NO: 219 - protein, 13 aa, synthetic construct
  REGION 1..13: note = Description of Artificial Sequence: Synthetic peptide
DGDLVGPTYYFDY

SEQ ID NO: 220 - protein, 11 aa, synthetic construct
  REGION 1..11: note = Description of Artificial Sequence: Synthetic peptide
SGDKLGDKYAC

SEQ ID NO: 221 - protein, 7 aa, synthetic construct
  REGION 1..7: note = Description of Artificial Sequence: Synthetic peptide
QHNKRPS

SEQ ID NO: 222 - protein, 9 aa, synthetic construct
  REGION 1..9: note = Description of Artificial Sequence: Synthetic peptide
QAWDSTTVV

SEQ ID NO: 223 - protein, 6 aa, synthetic construct
  REGION 1..6: note = Description of Artificial Sequence: Synthetic peptide
SPYTMN

SEQ ID NO: 224 - protein, 13 aa, synthetic construct
  REGION 1..13: note = Description of Artificial Sequence: Synthetic peptide
WVSSISSSSSYMY

SEQ ID NO: 225 - protein, 14 aa, synthetic construct
  REGION 1..14: note = Description of Artificial Sequence: Synthetic peptide
ARDGDLVGPTYYFD

SEQ ID NO: 226 - protein, 7 aa, synthetic construct
  REGION 1..7: note = Description of Artificial Sequence: Synthetic peptide
DKYACWY

SEQ ID NO: 227 - protein, 10 aa, synthetic construct
  REGION 1..10: note = Description of Artificial Sequence: Synthetic peptide
LVIYQHNKRP

SEQ ID NO: 228 - protein, 8 aa, synthetic construct
  REGION 1..8: note = Description of Artificial Sequence: Synthetic peptide
QAWDSTTV

SEQ ID NO: 229 - protein, 8 aa, synthetic construct
  REGION 1..8: note = Description of Artificial Sequence: Synthetic peptide
GFTFSPYT

SEQ ID NO: 230 - protein, 8 aa, synthetic construct
  REGION 1..8: note = Description of Artificial Sequence: Synthetic peptide
ISSSSSYM

SEQ ID NO: 231 - protein, 15 aa, synthetic construct
  REGION 1..15: note = Description of Artificial Sequence: Synthetic peptide
ARDGDLVGPTYYFDY

SEQ ID NO: 232 - protein, 6 aa, synthetic construct
  REGION 1..6: note = Description of Artificial Sequence: Synthetic peptide
KLGDKY

SEQ ID NO: 233 - skipped

SEQ ID NO: 234 - protein, 9 aa, synthetic construct
  REGION 1..9: note = Description of Artificial Sequence: Synthetic peptide
QAWDSTTVV

SEQ ID NO: 235 - protein, 122 aa, synthetic construct
  REGION 1..122: note = Description of Artificial Sequence: Synthetic polypeptide
EVQLVESGGGLVKPGGSLRLSCAASGFTFSPYTMNWVRQAPGKGLEWVSSISSSSSYMYYADSVKGRFTISRDNAKNSLYLQMNSLRAEDTAVYYCARDGDLVGPTYYFDYWGQGTLVTVSS

SEQ ID NO: 236 - protein, 106 aa, synthetic construct
  REGION 1..106: note = Description of Artificial Sequence: Synthetic polypeptide
SYELMQPPSVSVSPGQTASITCSGDKLGDKYACWYQQKPGQSPVLVIYQHNKRPSGIPERFSGSNSGKTATLTISGTQAMDEADYYCQAWDSTTVVFGGGTKLTVL

SEQ ID NO: 237 - protein, 452 aa, synthetic construct
  REGION 1..452: note = Description of Artificial Sequence: Synthetic polypeptide
EVQLVESGGGLVKPGGSLRLSCAASGFTFSPYTMNWVRQAPGKGLEWVSSISSSSSYMYYADSVKGRFTISRDNAKNSLYLQMNSLRAEDTAVYYCARDGDLVGPTYYFDYWGQGTLVTVSSASTKGPSVFPLAPSSKSTSGGTAALGCLVKDYFPEPVTVSWNSGALTSGVHTFPAVLQSSGLYSLSSVVTVPSSSLGTQTYICNVNHKPSNTKVDKKVEPKSCDKTHTCPPCPAPELLGGPSVFLFPPKPKDTLMISRTPEVTCVVVDVSHEDPEVKFNWYVDGVEVHNAKTKPREEQYNSTYRVVSVLTVLHQDWLNGKEYKCKVSNKALPAPIEKTISKAKGQPREPQVYTLPPSREEMTKNQVSLTCLVKGFYPSDIAVEWESNGQPENNYKTTPPVLDSDGSFFLYSKLTVDKSRWQQGNVFSCSVMHEALHNHYTQKSLSLSPGK

SEQ ID NO: 238 - protein, 212 aa, synthetic construct
  REGION 1..212: note = Description of Artificial Sequence: Synthetic polypeptide
SYELMQPPSVSVSPGQTASITCSGDKLGDKYACWYQQKPGQSPVLVIYQHNKRPSGIPERFSGSNSGKTATLTISGTQAMDEADYYCQAWDSTTVVFGGGTKLTVLGQPKAAPSVTLFPPSSEELQANKATLVCLISDFYPGAVTVAWKADSSPVKAGVETTTPSKQSNNKYAASSYLSLTPEQWKSHRSYSCQVTHEGSTVEKTVAPTECS

SEQ ID NO: 239 - protein, 5 aa, synthetic construct
  REGION 1..5: note = Description of Artificial Sequence: Synthetic peptide
SYDMN

SEQ ID NO: 240 - protein, 17 aa, synthetic construct
  REGION 1..17: note = Description of Artificial Sequence: Synthetic peptide
SISTSSGYIYYADSVKG

SEQ ID NO: 241 - protein, 16 aa, synthetic construct
  REGION 1..16: note = Description of Artificial Sequence: Synthetic peptide
DRGIAVAGDYYYGMDV

SEQ ID NO: 242 - protein, 12 aa, synthetic construct
  REGION 1..12: note = Description of Artificial Sequence: Synthetic peptide
RASQSVSSSYLA

SEQ ID NO: 243 - protein, 7 aa, synthetic construct
  REGION 1..7: note = Description of Artificial Sequence: Synthetic peptide
GASSRAT

SEQ ID NO: 244 - protein, 10 aa, synthetic construct
  REGION 1..10: note = Description of Artificial Sequence: Synthetic peptide
QQYGSSPPYT

SEQ ID NO: 245 - protein, 7 aa, synthetic construct
  REGION 1..7: note = Description of Artificial Sequence: Synthetic peptide
GFTFRSY

SEQ ID NO: 246 - protein, 6 aa, synthetic construct
  REGION 1..6: note = Description of Artificial Sequence: Synthetic peptide
STSSGY

SEQ ID NO: 247 - protein, 15 aa, synthetic construct
  REGION 1..15: note = Description of Artificial Sequence: Synthetic peptide
DRGIAVAGDYYYGMD

SEQ ID NO: 248 - protein, 8 aa, synthetic construct
  REGION 1..8: note = Description of Artificial Sequence: Synthetic peptide
SQSVSSSY

SEQ ID NO: 249 - skipped

SEQ ID NO: 250 - protein, 7 aa, synthetic construct
  REGION 1..7: note = Description of Artificial Sequence: Synthetic peptide
YGSSPPY

SEQ ID NO: 251 - protein, 10 aa, synthetic construct
  REGION 1..10: note = Description of Artificial Sequence: Synthetic peptide
GFTFRSYDMN

SEQ ID NO: 252 - protein, 10 aa, synthetic construct
  REGION 1..10: note = Description of Artificial Sequence: Synthetic peptide
SISTSSGYIY

SEQ ID NO: 253 - protein, 16 aa, synthetic construct
  REGION 1..16: note = Description of Artificial Sequence: Synthetic peptide
DRGIAVAGDYYYGMDV

SEQ ID NO: 254 - protein, 12 aa, synthetic construct
  REGION 1..12: note = Description of Artificial Sequence: Synthetic peptide
RASQSVSSSYLA

SEQ ID NO: 255 - protein, 7 aa, synthetic construct
  REGION 1..7: note = Description of Artificial Sequence: Synthetic peptide
GASSRAT

SEQ ID NO: 256 - protein, 10 aa, synthetic construct
  REGION 1..10: note = Description of Artificial Sequence: Synthetic peptide
QQYGSSPPYT

SEQ ID NO: 257 - protein, 6 aa, synthetic construct
  REGION 1..6: note = Description of Artificial Sequence: Synthetic peptide
RSYDMN

SEQ ID NO: 258 - protein, 13 aa, synthetic construct
  REGION 1..13: note = Description of Artificial Sequence: Synthetic peptide
WVSSISTSSGYIY

SEQ ID NO: 259 - protein, 17 aa, synthetic construct
  REGION 1..17: note = Description of Artificial Sequence: Synthetic peptide
ARDRGIAVAGDYYYGMD

SEQ ID NO: 260 - protein, 8 aa, synthetic construct
  REGION 1..8: note = Description of Artificial Sequence: Synthetic peptide
SSSYLAWY

SEQ ID NO: 261 - protein, 10 aa, synthetic construct
  REGION 1..10: note = Description of Artificial Sequence: Synthetic peptide
LLIYGASSRA

SEQ ID NO: 262 - protein, 9 aa, synthetic construct
  REGION 1..9: note = Description of Artificial Sequence: Synthetic peptide
QQYGSSPPY

SEQ ID NO: 263 - protein, 8 aa, synthetic construct
  REGION 1..8: note = Description of Artificial Sequence: Synthetic peptide
GFTFRSYD

SEQ ID NO: 264 - protein, 8 aa, synthetic construct
  REGION 1..8: note = Description of Artificial Sequence: Synthetic peptide
ISTSSGYI

SEQ ID NO: 265 - protein, 18 aa, synthetic construct
  REGION 1..18: note = Description of Artificial Sequence: Synthetic peptide
ARDRGIAVAGDYYYGMDV

SEQ ID NO: 266 - protein, 7 aa, synthetic construct
  REGION 1..7: note = Description of Artificial Sequence: Synthetic peptide
QSVSSSY

SEQ ID NO: 267 - skipped

SEQ ID NO: 268 - protein, 10 aa, synthetic construct
  REGION 1..10: note = Description of Artificial Sequence: Synthetic peptide
QQYGSSPPYT

SEQ ID NO: 269 - protein, 125 aa, synthetic construct
  REGION 1..125: note = Description of Artificial Sequence: Synthetic polypeptide
EVQLVESGGGLVKPGGSLRLSCAGSGFTFRSYDMNWVRQAPGKGLEWVSSISTSSGYIYYADSVKGRFTISRDNAKNSLSLQMNSLRAEDTAVFYCARDRGIAVAGDYYYGMDVWGQGTMVTVSS

SEQ ID NO: 270 - protein, 109 aa, synthetic construct
  REGION 1..109: note = Description of Artificial Sequence: Synthetic polypeptide
EIVMTQSPGTLSLSPGERATLSCRASQSVSSSYLAWYQQKPGQAPRLLIYGASSRATGIPDRFSGSGSGTDFTLTISRLEAEDFAVYYCQQYGSSPPYTFGQGTKVEIK

SEQ ID NO: 271 - protein, 455 aa, synthetic construct
  REGION 1..455: note = Description of Artificial Sequence: Synthetic polypeptide
EVQLVESGGGLVKPGGSLRLSCAGSGFTFRSYDMNWVRQAPGKGLEWVSSISTSSGYIYYADSVKGRFTISRDNAKNSLSLQMNSLRAEDTAVFYCARDRGIAVAGDYYYGMDVWGQGTMVTVSSASTKGPSVFPLAPSSKSTSGGTAALGCLVKDYFPEPVTVSWNSGALTSGVHTFPAVLQSSGLYSLSSVVTVPSSSLGTQTYICNVNHKPSNTKVDKKVEPKSCDKTHTCPPCPAPELLGGPSVFLFPPKPKDTLMISRTPEVTCVVVDVSHEDPEVKFNWYVDGVEVHNAKTKPREEQYNSTYRVVSVLTVLHQDWLNGKEYKCKVSNKALPAPIEKTISKAKGQPREPQVYTLPPSREEMTKNQVSLTCLVKGFYPSDIAVEWESNGQPENNYKTTPPVLDSDGSFFLYSKLTVDKSRWQQGNVFSCSVMHEALHNHYTQKSLSLSPGK

SEQ ID NO: 272 - protein, 216 aa, synthetic construct
  REGION 1..216: note = Description of Artificial Sequence: Synthetic polypeptide
EIVMTQSPGTLSLSPGERATLSCRASQSVSSSYLAWYQQKPGQAPRLLIYGASSRATGIPDRFSGSGSGTDFTLTISRLEAEDFAVYYCQQYGSSPPYTFGQGTKVEIKRTVAAPSVFIFPPSDEQLKSGTASVVCLLNNFYPREAKVQWKVDNALQSGNSQESVTEQDSKDSTYSLSSTLTLSKADYEKHKVYACEVTHQGLSSPVTKSFNRGEC

SEQ ID NO: 273 - protein, 5 aa, synthetic construct
  REGION 1..5: note = Description of Artificial Sequence: Synthetic peptide
NYDMN

SEQ ID NO: 274 - protein, 17 aa, synthetic construct
  REGION 1..17: note = Description of Artificial Sequence: Synthetic peptide
SISSSSSYIYYADSVKG

SEQ ID NO: 275 - protein, 15 aa, synthetic construct
  REGION 1..15: note = Description of Artificial Sequence: Synthetic peptide
DVGVTTDYYYYGMDV

SEQ ID NO: 276 - protein, 12 aa, synthetic construct
  REGION 1..12: note = Description of Artificial Sequence: Synthetic peptide
RASQSVASSYLA

SEQ ID NO: 277 - protein, 7 aa, synthetic construct
  REGION 1..7: note = Description of Artificial Sequence: Synthetic peptide
GASSRAT

SEQ ID NO: 278 - protein, 10 aa, synthetic construct
  REGION 1..10: note = Description of Artificial Sequence: Synthetic peptide
QQYGSSPPYT

SEQ ID NO: 279 - protein, 7 aa, synthetic construct
  REGION 1..7: note = Description of Artificial Sequence: Synthetic peptide
GFTFSNY

SEQ ID NO: 280 - protein, 6 aa, synthetic construct
  REGION 1..6: note = Description of Artificial Sequence: Synthetic peptide
SSSSSY

SEQ ID NO: 281 - protein, 14 aa, synthetic construct
  REGION 1..14: note = Description of Artificial Sequence: Synthetic peptide
DVGVTTDYYYYGMD

SEQ ID NO: 282 - protein, 8 aa, synthetic construct
  REGION 1..8: note = Description of Artificial Sequence: Synthetic peptide
SQSVASSY

SEQ ID NO: 283 - skipped

SEQ ID NO: 284 - protein, 7 aa, synthetic construct
  REGION 1..7: note = Description of Artificial Sequence: Synthetic peptide
YGSSPPY

SEQ ID NO: 285 - protein, 10 aa, synthetic construct
  REGION 1..10: note = Description of Artificial Sequence: Synthetic peptide
GFTFSNYDMN

SEQ ID NO: 286 - protein, 10 aa, synthetic construct
  REGION 1..10: note = Description of Artificial Sequence: Synthetic peptide
SISSSSSYIY

SEQ ID NO: 287 - protein, 15 aa, synthetic construct
  REGION 1..15: note = Description of Artificial Sequence: Synthetic peptide
DVGVTTDYYYYGMDV

SEQ ID NO: 288 - protein, 12 aa, synthetic construct
  REGION 1..12: note = Description of Artificial Sequence: Synthetic peptide
RASQSVASSYLA

SEQ ID NO: 289 - protein, 7 aa, synthetic construct
  REGION 1..7: note = Description of Artificial Sequence: Synthetic peptide
GASSRAT

SEQ ID NO: 290 - protein, 10 aa, synthetic construct
  REGION 1..10: note = Description of Artificial Sequence: Synthetic peptide
QQYGSSPPYT

SEQ ID NO: 291 - protein, 6 aa, synthetic construct
  REGION 1..6: note = Description of Artificial Sequence: Synthetic peptide
SNYDMN

SEQ ID NO: 292 - protein, 13 aa, synthetic construct
  REGION 1..13: note = Description of Artificial Sequence: Synthetic peptide
WVSSISSSSSYIY

SEQ ID NO: 293 - protein, 16 aa, synthetic construct
  REGION 1..16: note = Description of Artificial Sequence: Synthetic peptide
ARDVGVTTDYYYYGMD

SEQ ID NO: 294 - protein, 8 aa, synthetic construct
  REGION 1..8: note = Description of Artificial Sequence: Synthetic peptide
ASSYLAWY

SEQ ID NO: 295 - protein, 10 aa, synthetic construct
  REGION 1..10: note = Description of Artificial Sequence: Synthetic peptide
LLIYGASSRA

SEQ ID NO: 296 - protein, 9 aa, synthetic construct
  REGION 1..9: note = Description of Artificial Sequence: Synthetic peptide
QQYGSSPPY

SEQ ID NO: 297 - protein, 8 aa, synthetic construct
  REGION 1..8: note = Description of Artificial Sequence: Synthetic peptide
GFTFSNYD

SEQ ID NO: 298 - protein, 8 aa, synthetic construct
  REGION 1..8: note = Description of Artificial Sequence: Synthetic peptide
ISSSSSYI

SEQ ID NO: 299 - protein, 17 aa, synthetic construct
  REGION 1..17: note = Description of Artificial Sequence: Synthetic peptide
ARDVGVTTDYYYYGMDV

SEQ ID NO: 300 - protein, 7 aa, synthetic construct
  REGION 1..7: note = Description of Artificial Sequence: Synthetic peptide
QSVASSY

SEQ ID NO: 301 - skipped

SEQ ID NO: 302 - protein, 10 aa, synthetic construct
  REGION 1..10: note = Description of Artificial Sequence: Synthetic peptide
QQYGSSPPYT

SEQ ID NO: 303 - protein, 124 aa, synthetic construct
  REGION 1..124: note = Description of Artificial Sequence: Synthetic polypeptide
EVQLVQSGGGLVKPGGSLRLSCSASGFTFSNYDMNWVRQAPGKGLEWVSSISSSSSYIYYADSVKGRFTISRDNAKNSLYLQMNSLRAEDTAVYHCARDVGVTTDYYYYGMDVWGQGTMVTVSS

SEQ ID NO: 304 - protein, 109 aa, synthetic construct
  REGION 1..109: note = Description of Artificial Sequence: Synthetic polypeptide
ETTLTQSPGTLSLSPGDRATLSCRASQSVASSYLAWYQQKPGQSPRLLIYGASSRATGIPDRFSGSGSGTDFTLTISRLEPEDFAVYYCQQYGSSPPYTFGQGTKVEIK

SEQ ID NO: 305 - protein, 454 aa, synthetic construct
  REGION 1..454: note = Description of Artificial Sequence: Synthetic polypeptide
EVQLVQSGGGLVKPGGSLRLSCSASGFTFSNYDMNWVRQAPGKGLEWVSSISSSSSYIYYADSVKGRFTISRDNAKNSLYLQMNSLRAEDTAVYHCARDVGVTTDYYYYGMDVWGQGTMVTVSSASTKGPSVFPLAPSSKSTSGGTAALGCLVKDYFPEPVTVSWNSGALTSGVHTFPAVLQSSGLYSLSSVVTVPSSSLGTQTYICNVNHKPSNTKVDKKVEPKSCDKTHTCPPCPAPELLGGPSVFLFPPKPKDTLMISRTPEVTCVVVDVSHEDPEVKFNWYVDGVEVHNAKTKPREEQYNSTYRVVSVLTVLHQDWLNGKEYKCKVSNKALPAPIEKTISKAKGQPREPQVYTLPPSREEMTKNQVSLTCLVKGFYPSDIAVEWESNGQPENNYKTTPPVLDSDGSFFLYSKLTVDKSRWQQGNVFSCSVMHEALHNHYTQKSLSLSPGK

SEQ ID NO: 306 - protein, 216 aa, synthetic construct
  REGION 1..216: note = Description of Artificial Sequence: Synthetic polypeptide
ETTLTQSPGTLSLSPGDRATLSCRASQSVASSYLAWYQQKPGQSPRLLIYGASSRATGIPDRFSGSGSGTDFTLTISRLEPEDFAVYYCQQYGSSPPYTFGQGTKVEIKRTVAAPSVFIFPPSDEQLKSGTASVVCLLNNFYPREAKVQWKVDNALQSGNSQESVTEQDSKDSTYSLSSTLTLSKADYEKHKVYACEVTHQGLSSPVTKSFNRGEC

SEQ ID NO: 307 - protein, 5 aa, synthetic construct
  REGION 1..5: note = Description of Artificial Sequence: Synthetic peptide
INSMN

SEQ ID NO: 308 - protein, 17 aa, synthetic construct
  REGION 1..17: note = Description of Artificial Sequence: Synthetic peptide
SISSTSDYIFNADSVKG

SEQ ID NO: 309 - protein, 9 aa, synthetic construct
  REGION 1..9: note = Description of Artificial Sequence: Synthetic peptide
DDVFGAFDI

SEQ ID NO: 310 - protein, 12 aa, synthetic construct
  REGION 1..12: note = Description of Artificial Sequence: Synthetic peptide
RTSQSVSRSYLG

SEQ ID NO: 311 - protein, 7 aa, synthetic construct
  REGION 1..7: note = Description of Artificial Sequence: Synthetic peptide
GSSSRAT

SEQ ID NO: 312 - protein, 9 aa, synthetic construct
  REGION 1..9: note = Description of Artificial Sequence: Synthetic peptide
QQYSRSPLT

SEQ ID NO: 313 - protein, 7 aa, synthetic construct
  REGION 1..7: note = Description of Artificial Sequence: Synthetic peptide
GFTFSIN

SEQ ID NO: 314 - protein, 6 aa, synthetic construct
  REGION 1..6: note = Description of Artificial Sequence: Synthetic peptide
SSTSDY

SEQ ID NO: 315 - protein, 8 aa, synthetic construct
  REGION 1..8: note = Description of Artificial Sequence: Synthetic peptide
DDVFGAFD

SEQ ID NO: 316 - protein, 8 aa, synthetic construct
  REGION 1..8: note = Description of Artificial Sequence: Synthetic peptide
SQSVSRSY

SEQ ID NO: 317 - skipped

SEQ ID NO: 318 - protein, 6 aa, synthetic construct
  REGION 1..6: note = Description of Artificial Sequence: Synthetic peptide
YSRSPL

SEQ ID NO: 319 - protein, 10 aa, synthetic construct
  REGION 1..10: note = Description of Artificial Sequence: Synthetic peptide
GFTFSINSMN

SEQ ID NO: 320 - protein, 10 aa, synthetic construct
  REGION 1..10: note = Description of Artificial Sequence: Synthetic peptide
SISSTSDYIF

SEQ ID NO: 321 - protein, 9 aa, synthetic construct
  REGION 1..9: note = Description of Artificial Sequence: Synthetic peptide
DDVFGAFDI

SEQ ID NO: 322 - protein, 12 aa, synthetic construct
  REGION 1..12: note = Description of Artificial Sequence: Synthetic peptide
RTSQSVSRSYLG

SEQ ID NO: 323 - protein, 7 aa, synthetic construct
  REGION 1..7: note = Description of Artificial Sequence: Synthetic peptide
GSSSRAT

SEQ ID NO: 324 - protein, 9 aa, synthetic construct
  REGION 1..9: note = Description of Artificial Sequence: Synthetic peptide
QQYSRSPLT

SEQ ID NO: 325 - protein, 6 aa, synthetic construct
  REGION 1..6: note = Description of Artificial Sequence: Synthetic peptide
SINSMN

SEQ ID NO: 326 - protein, 13 aa, synthetic construct
  REGION 1..13: note = Description of Artificial Sequence: Synthetic peptide
WVSSISSTSDYIF

SEQ ID NO: 327 - protein, 10 aa, synthetic construct
  REGION 1..10: note = Description of Artificial Sequence: Synthetic peptide
VRDDVFGAFD

SEQ ID NO: 328 - protein, 8 aa, synthetic construct
  REGION 1..8: note = Description of Artificial Sequence: Synthetic peptide
SRSYLGWY

SEQ ID NO: 329 - protein, 10 aa, synthetic construct
  REGION 1..10: note = Description of Artificial Sequence: Synthetic peptide
LLIFGSSSRA

SEQ ID NO: 330 - protein, 8 aa, synthetic construct
  REGION 1..8: note = Description of Artificial Sequence: Synthetic peptide
QQYSRSPL

SEQ ID NO: 331 - protein, 8 aa, synthetic construct
  REGION 1..8: note = Description of Artificial Sequence: Synthetic peptide
GFTFSINS

SEQ ID NO: 332 - protein, 8 aa, synthetic construct
  REGION 1..8: note = Description of Artificial Sequence: Synthetic peptide
ISSTSDYI

SEQ ID NO: 333 - protein, 11 aa, synthetic construct
  REGION 1..11: note = Description of Artificial Sequence: Synthetic peptide
VRDDVFGAFDI

SEQ ID NO: 334 - protein, 7 aa, synthetic construct
  REGION 1..7: note = Description of Artificial Sequence: Synthetic peptide
QSVSRSY

SEQ ID NO: 335 - skipped

SEQ ID NO: 336 - protein, 9 aa, synthetic construct
  REGION 1..9: note = Description of Artificial Sequence: Synthetic peptide
QQYSRSPLT

SEQ ID NO: 337 - protein, 118 aa, synthetic construct
  REGION 1..118: note = Description of Artificial Sequence: Synthetic polypeptide
EVQLVESGGGLVKPGGSLRLSCEASGFTFSINSMNWVRQAPGKGLEWVSSISSTSDYIFNADSVKGRFTISRDNAKNSLYLQMNSLRAEDTAVYYCVRDDVFGAFDIWGQGTMVTVSS

SEQ ID NO: 338 - protein, 108 aa, synthetic construct
  REGION 1..108: note = Description of Artificial Sequence: Synthetic polypeptide
EIVLTQSPGTLSLSPGERATLSCRTSQSVSRSYLGWYQQKPGQPPRLLIFGSSSRATGIPDRFSGSGSGTDFTLTISRLEPEDFAVYYCQQYSRSPLTFGGGTKVDIK

SEQ ID NO: 339 - protein, 448 aa, synthetic construct
  REGION 1..448: note = Description of Artificial Sequence: Synthetic polypeptide
EVQLVESGGGLVKPGGSLRLSCEASGFTFSINSMNWVRQAPGKGLEWVSSISSTSDYIFNADSVKGRFTISRDNAKNSLYLQMNSLRAEDTAVYYCVRDDVFGAFDIWGQGTMVTVSSASTKGPSVFPLAPSSKSTSGGTAALGCLVKDYFPEPVTVSWNSGALTSGVHTFPAVLQSSGLYSLSSVVTVPSSSLGTQTYICNVNHKPSNTKVDKKVEPKSCDKTHTCPPCPAPELLGGPSVFLFPPKPKDTLMISRTPEVTCVVVDVSHEDPEVKFNWYVDGVEVHNAKTKPREEQYNSTYRVVSVLTVLHQDWLNGKEYKCKVSNKALPAPIEKTISKAKGQPREPQVYTLPPSREEMTKNQVSLTCLVKGFYPSDIAVEWESNGQPENNYKTTPPVLDSDGSFFLYSKLTVDKSRWQQGNVFSCSVMHEALHNHYTQKSLSLSPGK

SEQ ID NO: 340 - protein, 215 aa, synthetic construct
  REGION 1..215: note = Description of Artificial Sequence: Synthetic polypeptide
EIVLTQSPGTLSLSPGERATLSCRTSQSVSRSYLGWYQQKPGQPPRLLIFGSSSRATGIPDRFSGSGSGTDFTLTISRLEPEDFAVYYCQQYSRSPLTFGGGTKVDIKRTVAAPSVFIFPPSDEQLKSGTASVVCLLNNFYPREAKVQWKVDNALQSGNSQESVTEQDSKDSTYSLSSTLTLSKADYEKHKVYACEVTHQGLSSPVTKSFNRGEC

SEQ ID NO: 341 - protein, 5 aa, synthetic construct
  REGION 1..5: note = Description of Artificial Sequence: Synthetic peptide
NYDMN

SEQ ID NO: 342 - protein, 17 aa, synthetic construct
  REGION 1..17: note = Description of Artificial Sequence: Synthetic peptide
SISSSSSYIYYADSVKG

SEQ ID NO: 343 - protein, 15 aa, synthetic construct
  REGION 1..15: note = Description of Artificial Sequence: Synthetic peptide
DVGVTTDYYYYGMDV

SEQ ID NO: 344 - protein, 12 aa, synthetic construct
  REGION 1..12: note = Description of Artificial Sequence: Synthetic peptide
RASQSVASSYLA

SEQ ID NO: 345 - protein, 7 aa, synthetic construct
  REGION 1..7: note = Description of Artificial Sequence: Synthetic peptide
GASSRAT

SEQ ID NO: 346 - protein, 10 aa, synthetic construct
  REGION 1..10: note = Description of Artificial Sequence: Synthetic peptide
QQYGSSPPYT

SEQ ID NO: 347 - protein, 7 aa, synthetic construct
  REGION 1..7: note = Description of Artificial Sequence: Synthetic peptide
GFTFSNY

SEQ ID NO: 348 - protein, 6 aa, synthetic construct
  REGION 1..6: note = Description of Artificial Sequence: Synthetic peptide
SSSSSY

SEQ ID NO: 349 - protein, 14 aa, synthetic construct
  REGION 1..14: note = Description of Artificial Sequence: Synthetic peptide
DVGVTTDYYYYGMD

SEQ ID NO: 350 - protein, 8 aa, synthetic construct
  REGION 1..8: note = Description of Artificial Sequence: Synthetic peptide
SQSVASSY

SEQ ID NO: 351 - skipped

SEQ ID NO: 352 - protein, 7 aa, synthetic construct
  REGION 1..7: note = Description of Artificial Sequence: Synthetic peptide
YGSSPPY

SEQ ID NO: 353 - protein, 10 aa, synthetic construct
  REGION 1..10: note = Description of Artificial Sequence: Synthetic peptide
GFTFSNYDMN

SEQ ID NO: 354 - protein, 10 aa, synthetic construct
  REGION 1..10: note = Description of Artificial Sequence: Synthetic peptide
SISSSSSYIY

SEQ ID NO: 355 - protein, 15 aa, synthetic construct
  REGION 1..15: note = Description of Artificial Sequence: Synthetic peptide
DVGVTTDYYYYGMDV

SEQ ID NO: 356 - protein, 12 aa, synthetic construct
  REGION 1..12: note = Description of Artificial Sequence: Synthetic peptide
RASQSVASSYLA

SEQ ID NO: 357 - protein, 7 aa, synthetic construct
  REGION 1..7: note = Description of Artificial Sequence: Synthetic peptide
GASSRAT

SEQ ID NO: 358 - protein, 10 aa, synthetic construct
  REGION 1..10: note = Description of Artificial Sequence: Synthetic peptide
QQYGSSPPYT

SEQ ID NO: 359 - protein, 6 aa, synthetic construct
  REGION 1..6: note = Description of Artificial Sequence: Synthetic peptide
SNYDMN

SEQ ID NO: 360 - protein, 13 aa, synthetic construct
  REGION 1..13: note = Description of Artificial Sequence: Synthetic peptide
WVSSISSSSSYIY

SEQ ID NO: 361 - protein, 16 aa, synthetic construct
  REGION 1..16: note = Description of Artificial Sequence: Synthetic peptide
ARDVGVTTDYYYYGMD

SEQ ID NO: 362 - protein, 8 aa, synthetic construct
  REGION 1..8: note = Description of Artificial Sequence: Synthetic peptide
ASSYLAWY

SEQ ID NO: 363 - protein, 10 aa, synthetic construct
  REGION 1..10: note = Description of Artificial Sequence: Synthetic peptide
LLIYGASSRA

SEQ ID NO: 364 - protein, 9 aa, synthetic construct
  REGION 1..9: note = Description of Artificial Sequence: Synthetic peptide
QQYGSSPPY

SEQ ID NO: 365 - protein, 8 aa, synthetic construct
  REGION 1..8: note = Description of Artificial Sequence: Synthetic peptide
GFTFSNYD

SEQ ID NO: 366 - protein, 8 aa, synthetic construct
  REGION 1..8: note = Description of Artificial Sequence: Synthetic peptide
ISSSSSYI

SEQ ID NO: 367 - protein, 17 aa, synthetic construct
  REGION 1..17: note = Description of Artificial Sequence: Synthetic peptide
ARDVGVTTDYYYYGMDV

SEQ ID NO: 368 - protein, 7 aa, synthetic construct
  REGION 1..7: note = Description of Artificial Sequence: Synthetic peptide
QSVASSY

SEQ ID NO: 369 - skipped

SEQ ID NO: 370 - protein, 10 aa, synthetic construct
  REGION 1..10: note = Description of Artificial Sequence: Synthetic peptide
QQYGSSPPYT

SEQ ID NO: 371 - protein, 124 aa, synthetic construct
  REGION 1..124: note = Description of Artificial Sequence: Synthetic polypeptide
EVQLVESGGGLVKPGGSLRLSCSASGFTFSNYDMNWVRQAPGKGLEWVSSISSSSSYIYYADSVKGRFTISRDNAKNSLYLQMNSLRAEDTAVYHCARDVGVTTDYYYYGMDVWGQGTTVTVSS

SEQ ID NO: 372 - protein, 109 aa, synthetic construct
  REGION 1..109: note = Description of Artificial Sequence: Synthetic polypeptide
EIVLTQSPGTLSLSPGDRATLSCRASQSVASSYLAWYQQKPGQSPRLLIYGASSRATGIPDRFSGSGSGTDFTLTISRLEPEDFAVYYCQQYGSSPPYTFGQGTKLEIK

SEQ ID NO: 373 - protein, 454 aa, synthetic construct
  REGION 1..454: note = Description of Artificial Sequence: Synthetic polypeptide
EVQLVESGGGLVKPGGSLRLSCSASGFTFSNYDMNWVRQAPGKGLEWVSSISSSSSYIYYADSVKGRFTISRDNAKNSLYLQMNSLRAEDTAVYHCARDVGVTTDYYYYGMDVWGQGTTVTVSSASTKGPSVFPLAPSSKSTSGGTAALGCLVKDYFPEPVTVSWNSGALTSGVHTFPAVLQSSGLYSLSSVVTVPSSSLGTQTYICNVNHKPSNTKVDKKVEPKSCDKTHTCPPCPAPELLGGPSVFLFPPKPKDTLMISRTPEVTCVVVDVSHEDPEVKFNWYVDGVEVHNAKTKPREEQYNSTYRVVSVLTVLHQDWLNGKEYKCKVSNKALPAPIEKTISKAKGQPREPQVYTLPPSREEMTKNQVSLTCLVKGFYPSDIAVEWESNGQPENNYKTTPPVLDSDGSFFLYSKLTVDKSRWQQGNVFSCSVMHEALHNHYTQKSLSLSPGK

SEQ ID NO: 374 - protein, 216 aa, synthetic construct
  REGION 1..216: note = Description of Artificial Sequence: Synthetic polypeptide
EIVLTQSPGTLSLSPGDRATLSCRASQSVASSYLAWYQQKPGQSPRLLIYGASSRATGIPDRFSGSGSGTDFTLTISRLEPEDFAVYYCQQYGSSPPYTFGQGTKLEIKRTVAAPSVFIFPPSDEQLKSGTASVVCLLNNFYPREAKVQWKVDNALQSGNSQESVTEQDSKDSTYSLSSTLTLSKADYEKHKVYACEVTHQGLSSPVTKSFNRGEC

SEQ ID NO: 375 - protein, 5 aa, synthetic construct
  REGION 1..5: note = Description of Artificial Sequence: Synthetic peptide
SYDIN

SEQ ID NO: 376 - protein, 17 aa, synthetic construct
  REGION 1..17: note = Description of Artificial Sequence: Synthetic peptide
SITSSSYYIYYADSVKG

SEQ ID NO: 377 - protein, 16 aa, synthetic construct
  REGION 1..16: note = Description of Artificial Sequence: Synthetic peptide
DLGVRGVDYYYYGLDV

SEQ ID NO: 378 - protein, 12 aa, synthetic construct
  REGION 1..12: note = Description of Artificial Sequence: Synthetic peptide
RASQSVSSSYLA

SEQ ID NO: 379 - protein, 7 aa, synthetic construct
  REGION 1..7: note = Description of Artificial Sequence: Synthetic peptide
GASSRAT

SEQ ID NO: 380 - protein, 10 aa, synthetic construct
  REGION 1..10: note = Description of Artificial Sequence: Synthetic peptide
QQYGSSPPYT

SEQ ID NO: 381 - protein, 7 aa, synthetic construct
  REGION 1..7: note = Description of Artificial Sequence: Synthetic peptide
GFTFSSY

SEQ ID NO: 382 - protein, 6 aa, synthetic construct
  REGION 1..6: note = Description of Artificial Sequence: Synthetic peptide
TSSSYY

SEQ ID NO: 383 - protein, 15 aa, synthetic construct
  REGION 1..15: note = Description of Artificial Sequence: Synthetic peptide
DLGVRGVDYYYYGLD

SEQ ID NO: 384 - protein, 8 aa, synthetic construct
  REGION 1..8: note = Description of Artificial Sequence: Synthetic peptide
SQSVSSSY

SEQ ID NO: 385 - skipped

SEQ ID NO: 386 - protein, 7 aa, synthetic construct
  REGION 1..7: note = Description of Artificial Sequence: Synthetic peptide
YGSSPPY

SEQ ID NO: 387 - protein, 10 aa, synthetic construct
  REGION 1..10: note = Description of Artificial Sequence: Synthetic peptide
GFTFSSYDIN

SEQ ID NO: 388 - protein, 10 aa, synthetic construct
  REGION 1..10: note = Description of Artificial Sequence: Synthetic peptide
SITSSSYYIY

SEQ ID NO: 389 - protein, 16 aa, synthetic construct
  REGION 1..16: note = Description of Artificial Sequence: Synthetic peptide
DLGVRGVDYYYYGLDV

SEQ ID NO: 390 - protein, 12 aa, synthetic construct
  REGION 1..12: note = Description of Artificial Sequence: Synthetic peptide
RASQSVSSSYLA

SEQ ID NO: 391 - protein, 7 aa, synthetic construct
  REGION 1..7: note = Description of Artificial Sequence: Synthetic peptide
GASSRAT

SEQ ID NO: 392 - protein, 10 aa, synthetic construct
  REGION 1..10: note = Description of Artificial Sequence: Synthetic peptide
QQYGSSPPYT

SEQ ID NO: 393 - protein, 6 aa, synthetic construct
  REGION 1..6: note = Description of Artificial Sequence: Synthetic peptide
SSYDIN

SEQ ID NO: 394 - protein, 13 aa, synthetic construct
  REGION 1..13: note = Description of Artificial Sequence: Synthetic peptide
WVSSITSSSYYIY

SEQ ID NO: 395 - protein, 17 aa, synthetic construct
  REGION 1..17: note = Description of Artificial Sequence: Synthetic peptide
ARDLGVRGVDYYYYGLD

SEQ ID NO: 396 - protein, 8 aa, synthetic construct
  REGION 1..8: note = Description of Artificial Sequence: Synthetic peptide
SSSYLAWY

SEQ ID NO: 397 - protein, 10 aa, synthetic construct
  REGION 1..10: note = Description of Artificial Sequence: Synthetic peptide
LLIYGASSRA

SEQ ID NO: 398 - protein, 9 aa, synthetic construct
  REGION 1..9: note = Description of Artificial Sequence: Synthetic peptide
QQYGSSPPY

SEQ ID NO: 399 - protein, 8 aa, synthetic construct
  REGION 1..8: note = Description of Artificial Sequence: Synthetic peptide
GFTFSSYD

SEQ ID NO: 400 - protein, 8 aa, synthetic construct
  REGION 1..8: note = Description of Artificial Sequence: Synthetic peptide
ITSSSYYI

SEQ ID NO: 401 - protein, 18 aa, synthetic construct
  REGION 1..18: note = Description of Artificial Sequence: Synthetic peptide
ARDLGVRGVDYYYYGLDV

SEQ ID NO: 402 - protein, 7 aa, synthetic construct
  REGION 1..7: note = Description of Artificial Sequence: Synthetic peptide
QSVSSSY

SEQ ID NO: 403 - skipped

SEQ ID NO: 404 - protein, 10 aa, synthetic construct
  REGION 1..10: note = Description of Artificial Sequence: Synthetic peptide
QQYGSSPPYT

SEQ ID NO: 405 - protein, 125 aa, synthetic construct
  REGION 1..125: note = Description of Artificial Sequence: Synthetic polypeptide
EVQLVESGGGLVKPGGSLRLSCAASGFTFSSYDINWVRQAPGKGLEWVSSITSSSYYIYYADSVKGRFTISRDNAKNSLYLQMNSLRAEDTAVYYCARDLGVRGVDYYYYGLDVWGQGTMVTVSS

SEQ ID NO: 406 - protein, 109 aa, synthetic construct
  REGION 1..109: note = Description of Artificial Sequence: Synthetic polypeptide
EIVMTQSPGTLSLSPGERATLSCRASQSVSSSYLAWYQQKPGQAPRLLIYGASSRATGIPDRFSGSGSGTDFTLTISRLEPEDFAVYYCQQYGSSPPYTFGQGTKVEIK

SEQ ID NO: 407 - protein, 455 aa, synthetic construct
  REGION 1..455: note = Description of Artificial Sequence: Synthetic polypeptide
EVQLVESGGGLVKPGGSLRLSCAASGFTFSSYDINWVRQAPGKGLEWVSSITSSSYYIYYADSVKGRFTISRDNAKNSLYLQMNSLRAEDTAVYYCARDLGVRGVDYYYYGLDVWGQGTMVTVSSASTKGPSVFPLAPSSKSTSGGTAALGCLVKDYFPEPVTVSWNSGALTSGVHTFPAVLQSSGLYSLSSVVTVPSSSLGTQTYICNVNHKPSNTKVDKKVEPKSCDKTHTCPPCPAPELLGGPSVFLFPPKPKDTLMISRTPEVTCVVVDVSHEDPEVKFNWYVDGVEVHNAKTKPREEQYNSTYRVVSVLTVLHQDWLNGKEYKCKVSNKALPAPIEKTISKAKGQPREPQVYTLPPSREEMTKNQVSLTCLVKGFYPSDIAVEWESNGQPENNYKTTPPVLDSDGSFFLYSKLTVDKSRWQQGNVFSCSVMHEALHNHYTQKSLSLSPGK

SEQ ID NO: 408 - protein, 216 aa, synthetic construct
  REGION 1..216: note = Description of Artificial Sequence: Synthetic polypeptide
EIVMTQSPGTLSLSPGERATLSCRASQSVSSSYLAWYQQKPGQAPRLLIYGASSRATGIPDRFSGSGSGTDFTLTISRLEPEDFAVYYCQQYGSSPPYTFGQGTKVEIKRTVAAPSVFIFPPSDEQLKSGTASVVCLLNNFYPREAKVQWKVDNALQSGNSQESVTEQDSKDSTYSLSSTLTLSKADYEKHKVYACEVTHQGLSSPVTKSFNRGEC

SEQ ID NO: 409 - protein, 5 aa, synthetic construct
  REGION 1..5: note = Description of Artificial Sequence: Synthetic peptide
NYDMN

SEQ ID NO: 410 - protein, 17 aa, synthetic construct
  REGION 1..17: note = Description of Artificial Sequence: Synthetic peptide
SISSSSSYIYYADSVKG

SEQ ID NO: 411 - protein, 15 aa, synthetic construct
  REGION 1..15: note = Description of Artificial Sequence: Synthetic peptide
DVGVTTDYYYYGMDV

SEQ ID NO: 412 - protein, 12 aa, synthetic construct
  REGION 1..12: note = Description of Artificial Sequence: Synthetic peptide
RASQSVASSYLA

SEQ ID NO: 413 - protein, 7 aa, synthetic construct
  REGION 1..7: note = Description of Artificial Sequence: Synthetic peptide
GASSRAT

SEQ ID NO: 414 - protein, 10 aa, synthetic construct
  REGION 1..10: note = Description of Artificial Sequence: Synthetic peptide
QQYGSSPPYT

SEQ ID NO: 415 - protein, 7 aa, synthetic construct
  REGION 1..7: note = Description of Artificial Sequence: Synthetic peptide
GFTFSNY

SEQ ID NO: 416 - protein, 6 aa, synthetic construct
  REGION 1..6: note = Description of Artificial Sequence: Synthetic peptide
SSSSSY

SEQ ID NO: 417 - protein, 14 aa, synthetic construct
  REGION 1..14: note = Description of Artificial Sequence: Synthetic peptide
DVGVTTDYYYYGMD

SEQ ID NO: 418 - protein, 8 aa, synthetic construct
  REGION 1..8: note = Description of Artificial Sequence: Synthetic peptide
SQSVASSY

SEQ ID NO: 419 - skipped

SEQ ID NO: 420 - protein, 7 aa, synthetic construct
  REGION 1..7: note = Description of Artificial Sequence: Synthetic peptide
YGSSPPY

SEQ ID NO: 421 - protein, 10 aa, synthetic construct
  REGION 1..10: note = Description of Artificial Sequence: Synthetic peptide
GFTFSNYDMN

SEQ ID NO: 422 - protein, 10 aa, synthetic construct
  REGION 1..10: note = Description of Artificial Sequence: Synthetic peptide
SISSSSSYIY

SEQ ID NO: 423 - protein, 15 aa, synthetic construct
  REGION 1..15: note = Description of Artificial Sequence: Synthetic peptide
DVGVTTDYYYYGMDV

SEQ ID NO: 424 - protein, 12 aa, synthetic construct
  REGION 1..12: note = Description of Artificial Sequence: Synthetic peptide
RASQSVASSYLA

SEQ ID NO: 425 - protein, 7 aa, synthetic construct
  REGION 1..7: note = Description of Artificial Sequence: Synthetic peptide
GASSRAT

SEQ ID NO: 426 - protein, 10 aa, synthetic construct
  REGION 1..10: note = Description of Artificial Sequence: Synthetic peptide
QQYGSSPPYT

SEQ ID NO: 427 - protein, 6 aa, synthetic construct
  REGION 1..6: note = Description of Artificial Sequence: Synthetic peptide
SNYDMN

SEQ ID NO: 428 - protein, 13 aa, synthetic construct
  REGION 1..13: note = Description of Artificial Sequence: Synthetic peptide
WVSSISSSSSYIY

SEQ ID NO: 429 - protein, 16 aa, synthetic construct
  REGION 1..16: note = Description of Artificial Sequence: Synthetic peptide
ARDVGVTTDYYYYGMD

SEQ ID NO: 430 - protein, 8 aa, synthetic construct
  REGION 1..8: note = Description of Artificial Sequence: Synthetic peptide
ASSYLAWY

SEQ ID NO: 431 - protein, 10 aa, synthetic construct
  REGION 1..10: note = Description of Artificial Sequence: Synthetic peptide
LLIYGASSRA

SEQ ID NO: 432 - protein, 9 aa, synthetic construct
  REGION 1..9: note = Description of Artificial Sequence: Synthetic peptide
QQYGSSPPY

SEQ ID NO: 433 - protein, 8 aa, synthetic construct
  REGION 1..8: note = Description of Artificial Sequence: Synthetic peptide
GFTFSNYD

SEQ ID NO: 434 - protein, 8 aa, synthetic construct
  REGION 1..8: note = Description of Artificial Sequence: Synthetic peptide
ISSSSSYI

SEQ ID NO: 435 - protein, 17 aa, synthetic construct
  REGION 1..17: note = Description of Artificial Sequence: Synthetic peptide
ARDVGVTTDYYYYGMDV

SEQ ID NO: 436 - protein, 7 aa, synthetic construct
  REGION 1..7: note = Description of Artificial Sequence: Synthetic peptide
QSVASSY

SEQ ID NO: 437 - skipped

SEQ ID NO: 438 - protein, 10 aa, synthetic construct
  REGION 1..10: note = Description of Artificial Sequence: Synthetic peptide
QQYGSSPPYT

SEQ ID NO: 439 - protein, 124 aa, synthetic construct; identical to SEQ ID NO: 371
  REGION 1..124: note = Description of Artificial Sequence: Synthetic polypeptide

SEQ ID NO: 440 - protein, 109 aa, synthetic construct
  REGION 1..109: note = Description of Artificial Sequence: Synthetic polypeptide
ETTLTQSPGTLSLSPGDRATLSCRASQSVASSYLAWYQQKPGQSPRLLIYGASSRATGIPDRFSGSGSGTDFTLTISRLEPEDFAVYYCQQYGSSPPYTFGQGTKLEIK

SEQ ID NO: 441 - protein, 454 aa, synthetic construct; identical to SEQ ID NO: 373
  REGION 1..454: note = Description of Artificial Sequence: Synthetic polypeptide

SEQ ID NO: 442 - protein, 216 aa, synthetic construct
  REGION 1..216: note = Description of Artificial Sequence: Synthetic polypeptide
ETTLTQSPGTLSLSPGDRATLSCRASQSVASSYLAWYQQKPGQSPRLLIYGASSRATGIPDRFSGSGSGTDFTLTISRLEPEDFAVYYCQQYGSSPPYTFGQGTKLEIKRTVAAPSVFIFPPSDEQLKSGTASVVCLLNNFYPREAKVQWKVDNALQSGNSQESVTEQDSKDSTYSLSSTLTLSKADYEKHKVYACEVTHQGLSSPVTKSFNRGEC

SEQ ID NO: 443 - protein, 5 aa, synthetic construct
  REGION 1..5: note = Description of Artificial Sequence: Synthetic peptide
VYSMN

SEQ ID NO: 444 - protein, 17 aa, synthetic construct
  REGION 1..17: note = Description of Artificial Sequence: Synthetic peptide
SIGSSSSYIFYADSVKG

SEQ ID NO: 445 - protein, 9 aa, synthetic construct
  REGION 1..9: note = Description of Artificial Sequence: Synthetic peptide
DHDYGGLDY

SEQ ID NO: 446 - protein, 12 aa, synthetic construct
  REGION 1..12: note = Description of Artificial Sequence: Synthetic peptide
RASQSVSSSYLA

SEQ ID NO: 447 - protein, 7 aa, synthetic construct
  REGION 1..7: note = Description of Artificial Sequence: Synthetic peptide
GPSNRAT

SEQ ID NO: 448 - protein, 9 aa, synthetic construct
  REGION 1..9: note = Description of Artificial Sequence: Synthetic peptide
QQYGRSPLT

SEQ ID NO: 449 - protein, 7 aa, synthetic construct
  REGION 1..7: note = Description of Artificial Sequence: Synthetic peptide
GFTFSVY

SEQ ID NO: 450 - protein, 6 aa, synthetic construct
  REGION 1..6: note = Description of Artificial Sequence: Synthetic peptide
GSSSSY

SEQ ID NO: 451 - protein, 8 aa, synthetic construct
  REGION 1..8: note = Description of Artificial Sequence: Synthetic peptide
DHDYGGLD

SEQ ID NO: 452 - protein, 8 aa, synthetic construct
  REGION 1..8: note = Description of Artificial Sequence: Synthetic peptide
SQSVSSSY

SEQ ID NO: 453 - skipped

SEQ ID NO: 454 - protein, 6 aa, synthetic construct
  REGION 1..6: note = Description of Artificial Sequence: Synthetic peptide
YGRSPL

SEQ ID NO: 455 - protein, 10 aa, synthetic construct
  REGION 1..10: note = Description of Artificial Sequence: Synthetic peptide
GFTFSVYSMN

SEQ ID NO: 456 - protein, 10 aa, synthetic construct
  REGION 1..10: note = Description of Artificial Sequence: Synthetic peptide
SIGSSSSYIF

SEQ ID NO: 457 - protein, 9 aa, synthetic construct
  REGION 1..9: note = Description of Artificial Sequence: Synthetic peptide
DHDYGGLDY

SEQ ID NO: 458 - protein, 12 aa, synthetic construct
  REGION 1..12: note = Description of Artificial Sequence: Synthetic peptide
RASQSVSSSYLA

SEQ ID NO: 459 - protein, 7 aa, synthetic construct
  REGION 1..7: note = Description of Artificial Sequence: Synthetic peptide
GPSNRAT

SEQ ID NO: 460 - protein, 9 aa, synthetic construct
  REGION 1..9: note = Description of Artificial Sequence: Synthetic peptide
QQYGRSPLT

SEQ ID NO: 461 - protein, 6 aa, synthetic construct
  REGION 1..6: note = Description of Artificial Sequence: Synthetic peptide
SVYSMN

SEQ ID NO: 462 - protein, 13 aa, synthetic construct
  REGION 1..13: note = Description of Artificial Sequence: Synthetic peptide
WVSSIGSSSSYIF

SEQ ID NO: 463 - protein, 10 aa, synthetic construct
  REGION 1..10: note = Description of Artificial Sequence: Synthetic peptide
GRDHDYGGLD

SEQ ID NO: 464 - protein, 8 aa, synthetic construct
  REGION 1..8: note = Description of Artificial Sequence: Synthetic peptide
SSSYLAWY

SEQ ID NO: 465 - protein, 10 aa, synthetic construct
  REGION 1..10: note = Description of Artificial Sequence: Synthetic peptide
LLIYGPSNRA

SEQ ID NO: 466 - protein, 8 aa, synthetic construct
  REGION 1..8: note = Description of Artificial Sequence: Synthetic peptide
QQYGRSPL

SEQ ID NO: 467 - protein, 8 aa, synthetic construct
  REGION 1..8: note = Description of Artificial Sequence: Synthetic peptide
GFTFSVYS

SEQ ID NO: 468 - protein, 8 aa, synthetic construct
  REGION 1..8: note = Description of Artificial Sequence: Synthetic peptide
IGSSSSYI

SEQ ID NO: 469 - protein, 11 aa, synthetic construct
  REGION 1..11: note = Description of Artificial Sequence: Synthetic peptide
GRDHDYGGLDY

SEQ ID NO: 470 - protein, 7 aa, synthetic construct
  REGION 1..7: note = Description of Artificial Sequence: Synthetic peptide
QSVSSSY

SEQ ID NO: 471 - skipped

SEQ ID NO: 472 - protein, 9 aa, synthetic construct
  REGION 1..9: note = Description of Artificial Sequence: Synthetic peptide
QQYGRSPLT

SEQ ID NO: 473 - protein, 118 aa, synthetic construct
  REGION 1..118: note = Description of Artificial Sequence: Synthetic polypeptide
EVQLVESGGGLVKPGGSLRLSCAASGFTFSVYSMNWVRQAPGKGLEWVSSIGSSSSYIFYADSVKGRFTISRDNAKNSLYLQMNSLRAEDTAVYYCGRDHDYGGLDYWGQGTLVTVSS

SEQ ID NO: 474 - protein, 108 aa, synthetic construct
  REGION 1..108: note = Description of Artificial Sequence: Synthetic polypeptide
EIVLTQSPGTLSLSPGERATLSCRASQSVSSSYLAWYQQKPGQAPRLLIYGPSNRATDIPDRFSGTGSGTDFTLTISRLEPEDFAVYYCQQYGRSPLTFGGGTKVEIK

SEQ ID NO: 475 - protein, 448 aa, synthetic construct
  REGION 1..448: note = Description of Artificial Sequence: Synthetic polypeptide
EVQLVESGGGLVKPGGSLRLSCAASGFTFSVYSMNWVRQAPGKGLEWVSSIGSSSSYIFYADSVKGRFTISRDNAKNSLYLQMNSLRAEDTAVYYCGRDHDYGGLDYWGQGTLVTVSSASTKGPSVFPLAPSSKSTSGGTAALGCLVKDYFPEPVTVSWNSGALTSGVHTFPAVLQSSGLYSLSSVVTVPSSSLGTQTYICNVNHKPSNTKVDKKVEPKSCDKTHTCPPCPAPELLGGPSVFLFPPKPKDTLMISRTPEVTCVVVDVSHEDPEVKFNWYVDGVEVHNAKTKPREEQYNSTYRVVSVLTVLHQDWLNGKEYKCKVSNKALPAPIEKTISKAKGQPREPQVYTLPPSREEMTKNQVSLTCLVKGFYPSDIAVEWESNGQPENNYKTTPPVLDSDGSFFLYSKLTVDKSRWQQGNVFSCSVMHEALHNHYTQKSLSLSPGK

SEQ ID NO: 476 - protein, 215 aa, synthetic construct
  REGION 1..215: note = Description of Artificial Sequence: Synthetic polypeptide
EIVLTQSPGTLSLSPGERATLSCRASQSVSSSYLAWYQQKPGQAPRLLIYGPSNRATDIPDRFSGTGSGTDFTLTISRLEPEDFAVYYCQQYGRSPLTFGGGTKVEIKRTVAAPSVFIFPPSDEQLKSGTASVVCLLNNFYPREAKVQWKVDNALQSGNSQESVTEQDSKDSTYSLSSTLTLSKADYEKHKVYACEVTHQGLSSPVTKSFNRGEC

SEQ ID NO: 477 - protein, 5 aa, synthetic construct
  REGION 1..5: note = Description of Artificial Sequence: Synthetic peptide
SIYWS

SEQ ID NO: 478 - protein, 16 aa, synthetic construct
  REGION 1..16: note = Description of Artificial Sequence: Synthetic peptide
RIYTTDITNYNPSLKS

SEQ ID NO: 479 - protein, 10 aa, synthetic construct
  REGION 1..10: note = Description of Artificial Sequence: Synthetic peptide
NGYSYGGFNY

SEQ ID NO: 480 - protein, 14 aa, synthetic construct
  REGION 1..14: note = Description of Artificial Sequence: Synthetic peptide
TGSSSNIGAGYDVH

SEQ ID NO: 481 - protein, 7 aa, synthetic construct
  REGION 1..7: note = Description of Artificial Sequence: Synthetic peptide
GDSYRPS

SEQ ID NO: 482 - protein, 11 aa, synthetic construct
  REGION 1..11: note = Description of Artificial Sequence: Synthetic peptide
QSYDSSLSVVV

SEQ ID NO: 483 - protein, 7 aa, synthetic construct
  REGION 1..7: note = Description of Artificial Sequence: Synthetic peptide
GDSISSI

SEQ ID NO: 484 - protein, 5 aa, synthetic construct
  REGION 1..5: note = Description of Artificial Sequence: Synthetic peptide
YTTDI

SEQ ID NO: 485 - protein, 9 aa, synthetic construct
  REGION 1..9: note = Description of Artificial Sequence: Synthetic peptide
NGYSYGGFN

SEQ ID NO: 486 - protein, 10 aa, synthetic construct
  REGION 1..10: note = Description of Artificial Sequence: Synthetic peptide
SSSNIGAGYD

SEQ ID NO: 487 - skipped

SEQ ID NO: 488 - protein, 8 aa, synthetic construct
  REGION 1..8: note = Description of Artificial Sequence: Synthetic peptide
YDSSLSVV

SEQ ID NO: 489 - protein, 10 aa, synthetic construct
  REGION 1..10: note = Description of Artificial Sequence: Synthetic peptide
GDSISSIYWS

SEQ ID NO: 490 - protein, 9 aa, synthetic construct
  REGION 1..9: note = Description of Artificial Sequence: Synthetic peptide
RIYTTDITN

SEQ ID NO: 491 - protein, 10 aa, synthetic construct
  REGION 1..10: note = Description of Artificial Sequence: Synthetic peptide
NGYSYGGFNY

SEQ ID NO: 492 - protein, 14 aa, synthetic construct
  REGION 1..14: note = Description of Artificial Sequence: Synthetic peptide
TGSSSNIGAGYDVH

SEQ ID NO: 493 - protein, 7 aa, synthetic construct
  REGION 1..7: note = Description of Artificial Sequence: Synthetic peptide
GDSYRPS

SEQ ID NO: 494 - protein, 11 aa, synthetic construct
  REGION 1..11: note = Description of Artificial Sequence: Synthetic peptide
QSYDSSLSVVV

SEQ ID NO: 495 - protein, 6 aa, synthetic construct
  REGION 1..6: note = Description of Artificial Sequence: Synthetic peptide
SSIYWS

SEQ ID NO: 496 - protein, 12 aa, synthetic construct
  REGION 1..12: note = Description of Artificial Sequence: Synthetic peptide
WIGRIYTTDITN

SEQ ID NO: 497 - protein, 11 aa, synthetic construct
  REGION 1..11: note = Description of Artificial Sequence: Synthetic peptide
AKNGYSYGGFN

SEQ ID NO: 498 - protein, 10 aa, synthetic construct
  REGION 1..10: note = Description of Artificial Sequence: Synthetic peptide
IGAGYDVHWY

SEQ ID NO: 499 - protein, 10 aa, synthetic construct
  REGION 1..10: note = Description of Artificial Sequence: Synthetic peptide
LLIYGDSYRP

SEQ ID NO: 500 - protein, 10 aa, synthetic construct
  REGION 1..10: note = Description of Artificial Sequence: Synthetic peptide
QSYDSSLSVV

SEQ ID NO: 501 - protein, 8 aa, synthetic construct
  REGION 1..8: note = Description of Artificial Sequence: Synthetic peptide
GDSISSIY

SEQ ID NO: 502 - protein, 7 aa, synthetic construct
  REGION 1..7: note = Description of Artificial Sequence: Synthetic peptide
IYTTDIT

SEQ ID NO: 503 - protein, 12 aa, synthetic construct
  REGION 1..12: note = Description of Artificial Sequence: Synthetic peptide
AKNGYSYGGFNY

SEQ ID NO: 504 - protein, 9 aa, synthetic construct
  REGION 1..9: note = Description of Artificial Sequence: Synthetic peptide
SSNIGAGYD

SEQ ID NO: 505 - skipped

SEQ ID NO: 506 - protein, 11 aa, synthetic construct
  REGION 1..11: note = Description of Artificial Sequence: Synthetic peptide
QSYDSSLSVVV

SEQ ID NO: 507 - protein, 118 aa, synthetic construct
  REGION 1..118: note = Description of Artificial Sequence: Synthetic polypeptide
QVQLQESGPGLVKPSETLSLTCTVSGDSISSIYWSWIRQSAGKGLEWIGRIYTTDITNYNPSLKSRVTMSADTSKNQLSLKLTSVTAADTAVYYCAKNGYSYGGFNYWGQGTLVTVSS

SEQ ID NO: 508 - protein, 111 aa, synthetic construct
  REGION 1..111: note = Description of Artificial Sequence: Synthetic polypeptide
QSVLTQPPSVSGAPGQRVTISCTGSSSNIGAGYDVHWYQRLPGTAPKLLIYGDSYRPSGVPDRFSGSKSGTSASLAITGLQAEDEADYYCQSYDSSLSVVVFGGGTKLTVL

SEQ ID NO: 509 - protein, 448 aa, synthetic construct
  REGION 1..448: note = Description of Artificial Sequence: Synthetic polypeptide
QVQLQESGPGLVKPSETLSLTCTVSGDSISSIYWSWIRQSAGKGLEWIGRIYTTDITNYNPSLKSRVTMSADTSKNQLSLKLTSVTAADTAVYYCAKNGYSYGGFNYWGQGTLVTVSSASTKGPSVFPLAPSSKSTSGGTAALGCLVKDYFPEPVTVSWNSGALTSGVHTFPAVLQSSGLYSLSSVVTVPSSSLGTQTYICNVNHKPSNTKVDKKVEPKSCDKTHTCPPCPAPELLGGPSVFLFPPKPKDTLMISRTPEVTCVVVDVSHEDPEVKFNWYVDGVEVHNAKTKPREEQYNSTYRVVSVLTVLHQDWLNGKEYKCKVSNKALPAPIEKTISKAKGQPREPQVYTLPPSREEMTKNQVSLTCLVKGFYPSDIAVEWESNGQPENNYKTTPPVLDSDGSFFLYSKLTVDKSRWQQGNVFSCSVMHEALHNHYTQKSLSLSPGK

SEQ ID NO: 510 - protein, 217 aa, synthetic construct
  REGION 1..217: note = Description of Artificial Sequence: Synthetic polypeptide
QSVLTQPPSVSGAPGQRVTISCTGSSSNIGAGYDVHWYQRLPGTAPKLLIYGDSYRPSGVPDRFSGSKSGTSASLAITGLQAEDEADYYCQSYDSSLSVVVFGGGTKLTVLGQPKAAPSVTLFPPSSEELQANKATLVCLISDFYPGAVTVAWKADSSPVKAGVETTTPSKQSNNKYAASSYLSLTPEQWKSHRSYSCQVTHEGSTVEKTVAPTECS

SEQ ID NO: 511 - protein, 5 aa, synthetic construct
  REGION 1..5: note = Description of Artificial Sequence: Synthetic peptide
NYDMN

SEQ ID NO: 512 - protein, 17 aa, synthetic construct
  REGION 1..17: note = Description of Artificial Sequence: Synthetic peptide
SISSSSSYIYYADSVKG

SEQ ID NO: 513 - protein, 15 aa, synthetic construct
  REGION 1..15: note = Description of Artificial Sequence: Synthetic peptide
DVGVTTDYYYYGMDV

SEQ ID NO: 514 - protein, 13 aa, synthetic construct
  REGION 1..13: note = Description of Artificial Sequence: Synthetic peptide
SGSSSNIGSNTVN

SEQ ID NO: 515 - protein, 7 aa, synthetic construct
  REGION 1..7: note = Description of Artificial Sequence: Synthetic peptide
TNTQRPS

SEQ ID NO: 516 - protein, 11 aa, synthetic construct
  REGION 1..11: note = Description of Artificial Sequence: Synthetic peptide
AAWDDSLNAWV

SEQ ID NO: 517 - protein, 7 aa, synthetic construct
  REGION 1..7: note = Description of Artificial Sequence: Synthetic peptide
GFTFSNY

SEQ ID NO: 518 - protein, 6 aa, synthetic construct
  REGION 1..6: note = Description of Artificial Sequence: Synthetic peptide
SSSSSY

SEQ ID NO: 519 - protein, 14 aa, synthetic construct
  REGION 1..14: note = Description of Artificial Sequence: Synthetic peptide
DVGVTTDYYYYGMD

SEQ ID NO: 520 - protein, 9 aa, synthetic construct
  REGION 1..9: note = Description of Artificial Sequence: Synthetic peptide
SSSNIGSNT

SEQ ID NO: 521 - skipped

SEQ ID NO: 522 - protein, 8 aa, synthetic construct
  REGION 1..8: note = Description of Artificial Sequence: Synthetic peptide
WDDSLNAW

SEQ ID NO: 523 - protein, 10 aa, synthetic construct
  REGION 1..10: note = Description of Artificial Sequence: Synthetic peptide
GFTFSNYDMN

SEQ ID NO: 524 - protein, 10 aa, synthetic construct
  REGION 1..10: note = Description of Artificial Sequence: Synthetic peptide
SISSSSSYIY

SEQ ID NO: 525 - protein, 15 aa, synthetic construct
  REGION 1..15: note = Description of Artificial Sequence: Synthetic peptide
DVGVTTDYYYYGMDV

SEQ ID NO: 526 - protein, 13 aa, synthetic construct
  REGION 1..13: note = Description of Artificial Sequence: Synthetic peptide
SGSSSNIGSNTVN

SEQ ID NO: 527 - protein, 7 aa, synthetic construct
  REGION 1..7: note = Description of Artificial Sequence: Synthetic peptide
TNTQRPS

SEQ ID NO: 528 - protein, 11 aa, synthetic construct
  REGION 1..11: note = Description of Artificial Sequence: Synthetic peptide
AAWDDSLNAWV

SEQ ID NO: 529 - protein, 6 aa, synthetic construct
  REGION 1..6: note = Description of Artificial Sequence: Synthetic peptide
SNYDMN

SEQ ID NO: 530 - protein, 13 aa, synthetic construct
  REGION 1..13: note = Description of Artificial Sequence: Synthetic peptide
WVSSISSSSSYIY

SEQ ID NO: 531 - protein, 16 aa, synthetic construct
  REGION 1..16: note = Description of Artificial Sequence: Synthetic peptide
ARDVGVTTDYYYYGMD

SEQ ID NO: 532 - protein, 9 aa, synthetic construct
  REGION 1..9: note = Description of Artificial Sequence: Synthetic peptide
IGSNTVNWY

SEQ ID NO: 533 - protein, 10 aa, synthetic construct
  REGION 1..10: note = Description of Artificial Sequence: Synthetic peptide
LLIYTNTQRP

SEQ ID NO: 534 - protein, 10 aa, synthetic construct
  REGION 1..10: note = Description of Artificial Sequence: Synthetic peptide
AAWDDSLNAW

SEQ ID NO: 535 - protein, 8 aa, synthetic construct
  REGION 1..8: note = Description of Artificial Sequence: Synthetic peptide
GFTFSNYD

SEQ ID NO: 536 - protein, 8 aa, synthetic construct
  REGION 1..8: note = Description of Artificial Sequence: Synthetic peptide
ISSSSSYI

SEQ ID NO: 537 - protein, 17 aa, synthetic construct
  REGION 1..17: note = Description of Artificial Sequence: Synthetic peptide
ARDVGVTTDYYYYGMDV

SEQ ID NO: 538 - protein, 8 aa, synthetic construct
  REGION 1..8: note = Description of Artificial Sequence: Synthetic peptide
SSNIGSNT

SEQ ID NO: 539 - skipped

SEQ ID NO: 540 - protein, 11 aa, synthetic construct
  REGION 1..11: note = Description of Artificial Sequence: Synthetic peptide
AAWDDSLNAWV

SEQ ID NO: 541 - protein, 124 aa, synthetic construct; identical to SEQ ID NO: 371
  REGION 1..124: note = Description of Artificial Sequence: Synthetic polypeptide

SEQ ID NO: 542 - protein, 110 aa, synthetic construct
  REGION 1..110: note = Description of Artificial Sequence: Synthetic polypeptide
QPVLTQSSSASGTPGQRVTISCSGSSSNIGSNTVNWYQQFPGTAPKLLIYTNTQRPSGVPDRFSGSKSGTLVSLAISGLQSEDEADYYCAAWDDSLNAWVFGGGTKLTVL

SEQ ID NO: 543 - protein, 454 aa, synthetic construct; identical to SEQ ID NO: 373
  REGION 1..454: note = Description of Artificial Sequence: Synthetic polypeptide

SEQ ID NO: 544 - protein, 216 aa, synthetic construct
  REGION 1..216: note = Description of Artificial Sequence: Synthetic polypeptide
QPVLTQSSSASGTPGQRVTISCSGSSSNIGSNTVNWYQQFPGTAPKLLIYTNTQRPSGVPDRFSGSKSGTLVSLAISGLQSEDEADYYCAAWDDSLNAWVFGGGTKLTVLGQPKAAPSVTLFPPSSEELQANKATLVCLISDFYPGAVTVAWKADSSPVKAGVETTTPSKQSNNKYAASSYLSLTPEQWKSHRSYSCQVTHEGSTVEKTVAPTECS

SEQ ID NO: 545 - protein, 5 aa, synthetic construct
  REGION 1..5: note = Description of Artificial Sequence: Synthetic peptide
HYDMN

SEQ ID NO: 546 - protein, 17 aa, synthetic construct
  REGION 1..17: note = Description of Artificial Sequence: Synthetic peptide
SISSSSSYIFYADSVKG

SEQ ID NO: 547 - protein, 17 aa, synthetic construct
  REGION 1..17: note = Description of Artificial Sequence: Synthetic peptide
DRGVGDTSDYYSFGLDV

SEQ ID NO: 548 - protein, 12 aa, synthetic construct
  REGION 1..12: note = Description of Artificial Sequence: Synthetic peptide
RASQNVSSTYLA

SEQ ID NO: 549 - protein, 7 aa, synthetic construct
  REGION 1..7: note = Description of Artificial Sequence: Synthetic peptide
GACSRAT

SEQ ID NO: 550 - protein, 10 aa, synthetic construct
  REGION 1..10: note = Description of Artificial Sequence: Synthetic peptide
QQYGSSPPYT

SEQ ID NO: 551 - protein, 7 aa, synthetic construct
  REGION 1..7: note = Description of Artificial Sequence: Synthetic peptide
GFTFSHY

SEQ ID NO: 552 - protein, 6 aa, synthetic construct
  REGION 1..6: note = Description of Artificial Sequence: Synthetic peptide
SSSSSY

SEQ ID NO: 553 - protein, 16 aa, synthetic construct
  REGION 1..16: note = Description of Artificial Sequence: Synthetic peptide
DRGVGDTSDYYSFGLD

SEQ ID NO: 554 - protein, 8 aa, synthetic construct
  REGION 1..8: note = Description of Artificial Sequence: Synthetic peptide
SQNVSSTY

SEQ ID NO: 555 - skipped

SEQ ID NO: 556 - protein, 7 aa, synthetic construct
  REGION 1..7: note = Description of Artificial Sequence: Synthetic peptide
YGSSPPY

SEQ ID NO: 557 - protein, 10 aa, synthetic construct
  REGION 1..10: note = Description of Artificial Sequence: Synthetic peptide
GFTFSHYDMN

SEQ ID NO: 558 - protein, 10 aa, synthetic construct
  REGION 1..10: note = Description of Artificial Sequence: Synthetic peptide
SISSSSSYIF

SEQ ID NO: 559 - protein, 17 aa, synthetic construct
  REGION 1..17: note = Description of Artificial Sequence: Synthetic peptide
DRGVGDTSDYYSFGLDV

SEQ ID NO: 560 - protein, 12 aa, synthetic construct
  REGION 1..12: note = Description of Artificial Sequence: Synthetic peptide
RASQNVSSTYLA

SEQ ID NO: 561 - protein, 7 aa, synthetic construct
  REGION 1..7: note = Description of Artificial Sequence: Synthetic peptide
GACSRAT

SEQ ID NO: 562 - protein, 10 aa, synthetic construct
  REGION 1..10: note = Description of Artificial Sequence: Synthetic peptide
QQYGSSPPYT

SEQ ID NO: 563 - protein, 6 aa, synthetic construct
  REGION 1..6: note = Description of Artificial Sequence: Synthetic peptide
SHYDMN

SEQ ID NO: 564 - protein, 13 aa, synthetic construct
  REGION 1..13: note = Description of Artificial Sequence: Synthetic peptide
WVSSISSSSSYIF

SEQ ID NO: 565 - protein, 18 aa, synthetic construct
  REGION 1..18: note = Description of Artificial Sequence: Synthetic peptide
ARDRGVGDTSDYYSFGLD

SEQ ID NO: 566 - protein, 8 aa, synthetic construct
  REGION 1..8: note = Description of Artificial Sequence: Synthetic peptide
SSTYLAWY

SEQ ID NO: 567 - protein, 10 aa, synthetic construct
  REGION 1..10: note = Description of Artificial Sequence: Synthetic peptide
LLIYGACSRA

SEQ ID NO: 568 - protein, 9 aa, synthetic construct
  REGION 1..9: note = Description of Artificial Sequence: Synthetic peptide
QQYGSSPPY

SEQ ID NO: 569 - protein, 8 aa, synthetic construct
  REGION 1..8: note = Description of Artificial Sequence: Synthetic peptide
GFTFSHYD

SEQ ID NO: 570 - protein, 8 aa, synthetic construct
  REGION 1..8: note = Description of Artificial Sequence: Synthetic peptide
ISSSSSYI

SEQ ID NO: 571 - protein, 19 aa, synthetic construct
  REGION 1..19: note = Description of Artificial Sequence: Synthetic peptide
ARDRGVGDTSDYYSFGLDV

SEQ ID NO: 572 - protein, 7 aa, synthetic construct
  REGION 1..7: note = Description of Artificial Sequence: Synthetic peptide
QNVSSTY

SEQ ID NO: 573 - skipped

SEQ ID NO: 574 - protein, 10 aa, synthetic construct
  REGION 1..10: note = Description of Artificial Sequence: Synthetic peptide
QQYGSSPPYT

SEQ ID NO: 575 - protein, 126 aa, synthetic construct
  REGION 1..126: note = Description of Artificial Sequence: Synthetic polypeptide
EVQLVESGGGLVKPGGSLRLSCAASGFTFSHYDMNWVRQAPGKGLEWVSSISSSSSYIFYADSVKGRFTISRDNAKNSLLLQMNSLRAEDTAVYHCARDRGVGDTSDYYSFGLDVWGQGTMVTVSS

SEQ ID NO: 576 - protein, 109 aa, synthetic construct
  REGION 1..109: note = Description of Artificial Sequence: Synthetic polypeptide
DIVMTQSPGTLSLSPGERATLSCRASQNVSSTYLAWYQQKPGQAPRLLIYGACSRATGIPDRFSGSGSGTDFTLTISRLEPEDYAVYYCQQYGSSPPYTFGRGTKLEIK

SEQ ID NO: 577 - protein, 456 aa, synthetic construct
  REGION 1..456: note = Description of Artificial Sequence: Synthetic polypeptide
EVQLVESGGGLVKPGGSLRLSCAASGFTFSHYDMNWVRQAPGKGLEWVSSISSSSSYIFYADSVKGRFTISRDNAKNSLLLQMNSLRAEDTAVYHCARDRGVGDTSDYYSFGLDVWGQGTMVTVSSASTKGPSVFPLAPSSKSTSGGTAALGCLVKDYFPEPVTVSWNSGALTSGVHTFPAVLQSSGLYSLSSVVTVPSSSLGTQTYICNVNHKPSNTKVDKKVEPKSCDKTHTCPPCPAPELLGGPSVFLFPPKPKDTLMISRTPEVTCVVVDVSHEDPEVKFNWYVDGVEVHNAKTKPREEQYNSTYRVVSVLTVLHQDWLNGKEYKCKVSNKALPAPIEKTISKAKGQPREPQVYTLPPSREEMTKNQVSLTCLVKGFYPSDIAVEWESNGQPENNYKTTPPVLDSDGSFFLYSKLTVDKSRWQQGNVFSCSVMHEALHNHYTQKSLSLSPGK

SEQ ID NO: 578 - protein, 216 aa, synthetic construct
  REGION 1..216: note = Description of Artificial Sequence: Synthetic polypeptide
DIVMTQSPGTLSLSPGERATLSCRASQNVSSTYLAWYQQKPGQAPRLLIYGACSRATGIPDRFSGSGSGTDFTLTISRLEPEDYAVYYCQQYGSSPPYTFGRGTKLEIKRTVAAPSVFIFPPSDEQLKSGTASVVCLLNNFYPREAKVQWKVDNALQSGNSQESVTEQDSKDSTYSLSSTLTLSKADYEKHKVYACEVTHQGLSSPVTKSFNRGEC

SEQ ID NO: 579 - protein, 5 aa, synthetic construct
  REGION 1..5: note = Description of Artificial Sequence: Synthetic peptide
NYGMN

SEQ ID NO: 580 - protein, 17 aa, synthetic construct
  REGION 1..17: note = Description of Artificial Sequence: Synthetic peptide
YISSGSSYKYYADSMKG

SEQ ID NO: 581 - protein, 14 aa, synthetic construct
  REGION 1..14: note = Description of Artificial Sequence: Synthetic peptide
DPVVTEYYYYGMDV

SEQ ID NO: 582 - protein, 11 aa, synthetic construct
  REGION 1..11: note = Description of Artificial Sequence: Synthetic peptide
RASQGINSWLA

SEQ ID NO: 583 - protein, 7 aa, synthetic construct
  REGION 1..7: note = Description of Artificial Sequence: Synthetic peptide
AASSLQS

SEQ ID NO: 584 - protein, 9 aa, synthetic construct
  REGION 1..9: note = Description of Artificial Sequence: Synthetic peptide
QQANSFPWT

SEQ ID NO: 585 - protein, 7 aa, synthetic construct
  REGION 1..7: note = Description of Artificial Sequence: Synthetic peptide
GFTFSNY

SEQ ID NO: 586 - protein, 6 aa, synthetic construct
  REGION 1..6: note = Description of Artificial Sequence: Synthetic peptide
SSGSSY

SEQ ID NO: 587 - protein, 13 aa, synthetic construct
  REGION 1..13: note = Description of Artificial Sequence: Synthetic peptide
DPVVTEYYYYGMD

SEQ ID NO: 588 - protein, 7 aa, synthetic construct
  REGION 1..7: note = Description of Artificial Sequence: Synthetic peptide
SQGINSW

SEQ ID NO: 589 - skipped

SEQ ID NO: 590 - protein, 6 aa, synthetic construct
  REGION 1..6: note = Description of Artificial Sequence: Synthetic peptide
ANSFPW

SEQ ID NO: 591 - protein, 10 aa, synthetic construct
  REGION 1..10: note = Description of Artificial Sequence: Synthetic peptide
GFTFSNYGMN

SEQ ID NO: 592 - protein, 10 aa, synthetic construct
  REGION 1..10: note = Description of Artificial Sequence: Synthetic peptide
YISSGSSYKY

SEQ ID NO: 593 - protein, 14 aa, synthetic construct
  REGION 1..14: note = Description of Artificial Sequence: Synthetic peptide
DPVVTEYYYYGMDV

SEQ ID NO: 594 - protein, 11 aa, synthetic construct
  REGION 1..11: note = Description of Artificial Sequence: Synthetic peptide
RASQGINSWLA

SEQ ID NO: 595 - protein, 7 aa, synthetic construct
  REGION 1..7: note = Description of Artificial Sequence: Synthetic peptide
AASSLQS

SEQ ID NO: 596 - protein, 9 aa, synthetic construct
  REGION 1..9: note = Description of Artificial Sequence: Synthetic peptide
QQANSFPWT

SEQ ID NO: 597 - protein, 6 aa, synthetic construct
  REGION 1..6: note = Description of Artificial Sequence: Synthetic peptide
SNYGMN

SEQ ID NO: 598 - protein, 13 aa, synthetic construct
  REGION 1..13: note = Description of Artificial Sequence: Synthetic peptide
WVSYISSGSSYKY

SEQ ID NO: 599 - protein, 15 aa, synthetic construct
  REGION 1..15: note = Description of Artificial Sequence: Synthetic peptide
ARDPVVTEYYYYGMD

SEQ ID NO: 600 - protein, 7 aa, synthetic construct
  REGION 1..7: note = Description of Artificial Sequence: Synthetic peptide
NSWLAWY

SEQ ID NO: 601 - protein, 10 aa, synthetic construct
  REGION 1..10: note = Description of Artificial Sequence: Synthetic peptide
LLIYAASSLQ

SEQ ID NO: 602 - protein, 8 aa, synthetic construct
  REGION 1..8: note = Description of Artificial Sequence: Synthetic peptide
QQANSFPW

SEQ ID NO: 603 - protein, 8 aa, synthetic construct
  REGION 1..8: note = Description of Artificial Sequence: Synthetic peptide
GFTFSNYG

SEQ ID NO: 604 - protein, 8 aa, synthetic construct
  REGION 1..8: note = Description of Artificial Sequence: Synthetic peptide
ISSGSSYK

SEQ ID NO: 605 - protein, 16 aa, synthetic construct
  REGION 1..16: note = Description of Artificial Sequence: Synthetic peptide
ARDPVVTEYYYYGMDV

SEQ ID NO: 606 - protein, 6 aa, synthetic construct
  REGION 1..6: note = Description of Artificial Sequence: Synthetic peptide
QGINSW

SEQ ID NO: 607 - skipped

SEQ ID NO: 608 - protein, 9 aa, synthetic construct
  REGION 1..9: note = Description of Artificial Sequence: Synthetic peptide
QQANSFPWT

SEQ ID NO: 609 - protein, 123 aa, synthetic construct
  REGION 1..123: note = Description of Artificial Sequence: Synthetic polypeptide
EVQLVESGGGLVKPGGSLRLSCAASGFTFSNYGMNWVRQAPGKGLEWVSYISSGSSYKYYADSMKGRFTISRDNAMNLLYLQMNSLRPEDSAMYYCARDPVVTEYYYYGMDVWGQGTMVTVSS

SEQ ID NO: 610 - protein, 107 aa, synthetic construct
  REGION 1..107: note = Description of Artificial Sequence: Synthetic polypeptide
EIVMTQSPSSVSASVGDRVTITCRASQGINSWLAWYQQKPGNAPKLLIYAASSLQSGVPSRFSGIGSGTDFIFTISSLQPEDFASYYCQQANSFPWTFGQGTKVEIK

SEQ ID NO: 611 - protein, 453 aa, synthetic construct
  REGION 1..453: note = Description of Artificial Sequence: Synthetic polypeptide
EVQLVESGGGLVKPGGSLRLSCAASGFTFSNYGMNWVRQAPGKGLEWVSYISSGSSYKYYADSMKGRFTISRDNAMNLLYLQMNSLRPEDSAMYYCARDPVVTEYYYYGMDVWGQGTMVTVSSASTKGPSVFPLAPSSKSTSGGTAALGCLVKDYFPEPVTVSWNSGALTSGVHTFPAVLQSSGLYSLSSVVTVPSSSLGTQTYICNVNHKPSNTKVDKKVEPKSCDKTHTCPPCPAPELLGGPSVFLFPPKPKDTLMISRTPEVTCVVVDVSHEDPEVKFNWYVDGVEVHNAKTKPREEQYNSTYRVVSVLTVLHQDWLNGKEYKCKVSNKALPAPIEKTISKAKGQPREPQVYTLPPSREEMTKNQVSLTCLVKGFYPSDIAVEWESNGQPENNYKTTPPVLDSDGSFFLYSKLTVDKSRWQQGNVFSCSVMHEALHNHYTQKSLSLSPGK

SEQ ID NO: 612 - protein, 214 aa, synthetic construct
  REGION 1..214: note = Description of Artificial Sequence: Synthetic polypeptide
EIVMTQSPSSVSASVGDRVTITCRASQGINSWLAWYQQKPGNAPKLLIYAASSLQSGVPSRFSGIGSGTDFIFTISSLQPEDFASYYCQQANSFPWTFGQGTKVEIKRTVAAPSVFIFPPSDEQLKSGTASVVCLLNNFYPREAKVQWKVDNALQSGNSQESVTEQDSKDSTYSLSSTLTLSKADYEKHKVYACEVTHQGLSSPVTKSFNRGEC

SEQ ID NO: 613 - protein, 5 aa, synthetic construct
  REGION 1..5: note = Description of Artificial Sequence: Synthetic peptide
SYDMN

SEQ ID NO: 614 - protein, 17 aa, synthetic construct
  REGION 1..17: note = Description of Artificial Sequence: Synthetic peptide
SISSSSSYIYYADSVKG

SEQ ID NO: 615 - protein, 15 aa, synthetic construct
  REGION 1..15: note = Description of Artificial Sequence: Synthetic peptide
DVGVTTDYYYYGMDV

SEQ ID NO: 616 - protein, 12 aa, synthetic construct
  REGION 1..12: note = Description of Artificial Sequence: Synthetic peptide
RASQSVASSYLA

SEQ ID NO: 617 - protein, 7 aa, synthetic construct
  REGION 1..7: note = Description of Artificial Sequence: Synthetic peptide
GASSRAT

SEQ ID NO: 618 - protein, 10 aa, synthetic construct
  REGION 1..10: note = Description of Artificial Sequence: Synthetic peptide
QQYGSSPPYT

SEQ ID NO: 619 - protein, 7 aa, synthetic construct
  REGION 1..7: note = Description of Artificial Sequence: Synthetic peptide
GFTFSSY

SEQ ID NO: 620 - protein, 6 aa, synthetic construct
  REGION 1..6: note = Description of Artificial Sequence: Synthetic peptide
SSSSSY

SEQ ID NO: 621 - protein, 14 aa, synthetic construct
  REGION 1..14: note = Description of Artificial Sequence: Synthetic peptide
DVGVTTDYYYYGMD

SEQ ID NO: 622 - protein, 8 aa, synthetic construct
  REGION 1..8: note = Description of Artificial Sequence: Synthetic peptide
SQSVASSY

SEQ ID NO: 623 - skipped

SEQ ID NO: 624 - protein, 7 aa, synthetic construct
  REGION 1..7: note = Description of Artificial Sequence: Synthetic peptide
YGSSPPY

SEQ ID NO: 625 - protein, 10 aa, synthetic construct
  REGION 1..10: note = Description of Artificial Sequence: Synthetic peptide
GFTFSSYDMN

SEQ ID NO: 626 - protein, 10 aa, synthetic construct
  REGION 1..10: note = Description of Artificial Sequence: Synthetic peptide
SISSSSSYIY

SEQ ID NO: 627 - protein, 15 aa, synthetic construct
  REGION 1..15: note = Description of Artificial Sequence: Synthetic peptide
DVGVTTDYYYYGMDV

SEQ ID NO: 628 - protein, 12 aa, synthetic construct
  REGION 1..12: note = Description of Artificial Sequence: Synthetic peptide
RASQSVASSYLA

SEQ ID NO: 629 - protein, 7 aa, synthetic construct
  REGION 1..7: note = Description of Artificial Sequence: Synthetic peptide
GASSRAT

SEQ ID NO: 630 - protein, 10 aa, synthetic construct
  REGION 1..10: note = Description of Artificial Sequence: Synthetic peptide
QQYGSSPPYT

SEQ ID NO: 631 - protein, 6 aa, synthetic construct
  REGION 1..6: note = Description of Artificial Sequence: Synthetic peptide
SSYDMN

SEQ ID NO: 632 - protein, 13 aa, synthetic construct
  REGION 1..13: note = Description of Artificial Sequence: Synthetic peptide
WVSSISSSSSYIY

SEQ ID NO: 633 - protein, 16 aa, synthetic construct
  REGION 1..16: note = Description of Artificial Sequence: Synthetic peptide
ARDVGVTTDYYYYGMD

SEQ ID NO: 634 - protein, 8 aa, synthetic construct
  REGION 1..8: note = Description of Artificial Sequence: Synthetic peptide
ASSYLAWY

SEQ ID NO: 635 - protein, 10 aa, synthetic construct
  REGION 1..10: note = Description of Artificial Sequence: Synthetic peptide
LLIYGASSRA

SEQ ID NO: 636 - protein, 9 aa, synthetic construct
  REGION 1..9: note = Description of Artificial Sequence: Synthetic peptide
QQYGSSPPY

SEQ ID NO: 637 - protein, 8 aa, synthetic construct
  REGION 1..8: note = Description of Artificial Sequence: Synthetic peptide
GFTFSSYD

SEQ ID NO: 638 - protein, 8 aa, synthetic construct
  REGION 1..8: note = Description of Artificial Sequence: Synthetic peptide
ISSSSSYI

SEQ ID NO: 639 - protein, 17 aa, synthetic construct
  REGION 1..17: note = Description of Artificial Sequence: Synthetic peptide
ARDVGVTTDYYYYGMDV

SEQ ID NO: 640 - protein, 7 aa, synthetic construct
  REGION 1..7: note = Description of Artificial Sequence: Synthetic peptide
QSVASSY

SEQ ID NO: 641 - skipped

SEQ ID NO: 642 - protein, 10 aa, synthetic construct
  REGION 1..10: note = Description of Artificial Sequence: Synthetic peptide
QQYGSSPPYT

SEQ ID NO: 643 - protein, 124 aa, synthetic construct
  REGION 1..124: note = Description of Artificial Sequence: Synthetic polypeptide
EVQLLESGGGLVKPGGSLRLSCSASGFTFSSYDMNWVRQAPGKGLEWVSSISSSSSYIYYADSVKGRFTISRDNAKNSLYLQMNSLRAEDTAVYHCARDVGVTTDYYYYGMDVWGQGTMVTVSS

SEQ ID NO: 644 - protein, 109 aa, synthetic construct; identical to SEQ ID NO: 372
  REGION 1..109: note = Description of Artificial Sequence: Synthetic polypeptide

SEQ ID NO: 645 - protein, 454 aa, synthetic construct
  REGION 1..454: note = Description of Artificial Sequence: Synthetic polypeptide
EVQLLESGGGLVKPGGSLRLSCSASGFTFSSYDMNWVRQAPGKGLEWVSSISSSSSYIYYADSVKGRFTISRDNAKNSLYLQMNSLRAEDTAVYHCARDVGVTTDYYYYGMDVWGQGTMVTVSSASTKGPSVFPLAPSSKSTSGGTAALGCLVKDYFPEPVTVSWNSGALTSGVHTFPAVLQSSGLYSLSSVVTVPSSSLGTQTYICNVNHKPSNTKVDKKVEPKSCDKTHTCPPCPAPELLGGPSVFLFPPKPKDTLMISRTPEVTCVVVDVSHEDPEVKFNWYVDGVEVHNAKTKPREEQYNSTYRVVSVLTVLHQDWLNGKEYKCKVSNKALPAPIEKTISKAKGQPREPQVYTLPPSREEMTKNQVSLTCLVKGFYPSDIAVEWESNGQPENNYKTTPPVLDSDGSFFLYSKLTVDKSRWQQGNVFSCSVMHEALHNHYTQKSLSLSPGK

SEQ ID NO: 646 - protein, 216 aa, synthetic construct; identical to SEQ ID NO: 374
  REGION 1..216: note = Description of Artificial Sequence: Synthetic polypeptide

SEQ ID NO: 647 - protein, 5 aa, synthetic construct
  REGION 1..5: note = Description of Artificial Sequence: Synthetic peptide
NYDMN

SEQ ID NO: 648 - protein, 17 aa, synthetic construct
  REGION 1..17: note = Description of Artificial Sequence: Synthetic peptide
SISSSSSYIYYADSVKG

SEQ ID NO: 649 - protein, 15 aa, synthetic construct
  REGION 1..15: note = Description of Artificial Sequence: Synthetic peptide
DVGVTTDYYYYGMDV

SEQ ID NO: 650 - protein, 12 aa, synthetic construct
  REGION 1..12: note = Description of Artificial Sequence: Synthetic peptide
RASQSVASSYLA

SEQ ID NO: 651 - protein, 7 aa, synthetic construct
  REGION 1..7: note = Description of Artificial Sequence: Synthetic peptide
GASSRAT

SEQ ID NO: 652 - protein, 10 aa, synthetic construct
  REGION 1..10: note = Description of Artificial Sequence: Synthetic peptide
QQYGSSPPYT

SEQ ID NO: 653 - protein, 7 aa, synthetic construct
  REGION 1..7: note = Description of Artificial Sequence: Synthetic peptide
GFTFSNY

SEQ ID NO: 654 - protein, 6 aa, synthetic construct
  REGION 1..6: note = Description of Artificial Sequence: Synthetic peptide
SSSSSY

SEQ ID NO: 655 - protein, 14 aa, synthetic construct
  REGION 1..14: note = Description of Artificial Sequence: Synthetic peptide
DVGVTTDYYYYGMD

SEQ ID NO: 656 - protein, 8 aa, synthetic construct
  REGION 1..8: note = Description of Artificial Sequence: Synthetic peptide
SQSVASSY

SEQ ID NO: 657 - skipped

SEQ ID NO: 658 - protein, 7 aa, synthetic construct
  REGION 1..7: note = Description of Artificial Sequence: Synthetic peptide
YGSSPPY

SEQ ID NO: 659 - protein, 10 aa, synthetic construct
  REGION 1..10: note = Description of Artificial Sequence: Synthetic peptide
GFTFSNYDMN

SEQ ID NO: 660 - protein, 10 aa, synthetic construct
  REGION 1..10: note = Description of Artificial Sequence: Synthetic peptide
SISSSSSYIY

SEQ ID NO: 661 - protein, 15 aa, synthetic construct
  REGION 1..15: note = Description of Artificial Sequence: Synthetic peptide
DVGVTTDYYYYGMDV

SEQ ID NO: 662 - protein, 12 aa, synthetic construct
  REGION 1..12: note = Description of Artificial Sequence: Synthetic peptide
RASQSVASSYLA

SEQ ID NO: 663 - protein, 7 aa, synthetic construct
  REGION 1..7: note = Description of Artificial Sequence: Synthetic peptide
GASSRAT

SEQ ID NO: 664 - protein, 10 aa, synthetic construct
  REGION 1..10: note = Description of Artificial Sequence: Synthetic peptide
QQYGSSPPYT

SEQ ID NO: 665 - protein, 6 aa, synthetic construct
  REGION 1..6: note = Description of Artificial Sequence: Synthetic peptide
SNYDMN

SEQ ID NO: 666 - protein, 13 aa, synthetic construct
  REGION 1..13: note = Description of Artificial Sequence: Synthetic peptide
WVSSISSSSSYIY

SEQ ID NO: 667 - protein, 16 aa, synthetic construct
  REGION 1..16: note = Description of Artificial Sequence: Synthetic peptide
ARDVGVTTDYYYYGMD

SEQ ID NO: 668 - protein, 8 aa, synthetic construct
  REGION 1..8: note = Description of Artificial Sequence: Synthetic peptide
ASSYLAWY

SEQ ID NO: 669 - protein, 10 aa, synthetic construct
  REGION 1..10: note = Description of Artificial Sequence: Synthetic peptide
LLIYGASSRA

SEQ ID NO: 670 - protein, 9 aa, synthetic construct
  REGION 1..9: note = Description of Artificial Sequence: Synthetic peptide
QQYGSSPPY

SEQ ID NO: 671 - protein, 8 aa, synthetic construct
  REGION 1..8: note = Description of Artificial Sequence: Synthetic peptide
GFTFSNYD

SEQ ID NO: 672 - protein, 8 aa, synthetic construct
  REGION 1..8: note = Description of Artificial Sequence: Synthetic peptide
ISSSSSYI

SEQ ID NO: 673 - protein, 17 aa, synthetic construct
  REGION 1..17: note = Description of Artificial Sequence: Synthetic peptide
ARDVGVTTDYYYYGMDV

SEQ ID NO: 674 - protein, 7 aa, synthetic construct
  REGION 1..7: note = Description of Artificial Sequence: Synthetic peptide
QSVASSY

SEQ ID NO: 675 - skipped

SEQ ID NO: 676 - protein, 10 aa, synthetic construct
  REGION 1..10: note = Description of Artificial Sequence: Synthetic peptide
QQYGSSPPYT

SEQ ID NO: 677 - protein, 124 aa, synthetic construct; identical to SEQ ID NO: 201
  REGION 1..124: note = Description of Artificial Sequence: Synthetic polypeptide

SEQ ID NO: 678 - protein, 109 aa, synthetic construct; identical to SEQ ID NO: 304
  REGION 1..109: note = Description of Artificial Sequence: Synthetic polypeptide

SEQ ID NO: 679 - protein, 454 aa, synthetic construct; identical to SEQ ID NO: 203
  REGION 1..454: note = Description of Artificial Sequence: Synthetic polypeptide

SEQ ID NO: 680 - protein, 216 aa, synthetic construct; identical to SEQ ID NO: 306
  REGION 1..216: note = Description of Artificial Sequence: Synthetic polypeptide

SEQ ID NO: 681 - protein, 5 aa, synthetic construct
  REGION 1..5: note = Description of Artificial Sequence: Synthetic peptide
SYSMY

SEQ ID NO: 682 - protein, 17 aa, synthetic construct
  REGION 1..17: note = Description of Artificial Sequence: Synthetic peptide
SIGSSSTYIFYADSVKG

SEQ ID NO: 683 - protein, 9 aa, synthetic construct
  REGION 1..9: note = Description of Artificial Sequence: Synthetic peptide
DGELGPFEY

SEQ ID NO: 684 - protein, 12 aa, synthetic construct
  REGION 1..12: note = Description of Artificial Sequence: Synthetic peptide
RASQSVSTSYLA

SEQ ID NO: 685 - protein, 7 aa, synthetic construct
  REGION 1..7: note = Description of Artificial Sequence: Synthetic peptide
GTSSRAT

SEQ ID NO: 686 - protein, 9 aa, synthetic construct
  REGION 1..9: note = Description of Artificial Sequence: Synthetic peptide
LQYGRSPLT

SEQ ID NO: 687 - protein, 7 aa, synthetic construct
  REGION 1..7: note = Description of Artificial Sequence: Synthetic peptide
GFTFSSY

SEQ ID NO: 688 - protein, 6 aa, synthetic construct
  REGION 1..6: note = Description of Artificial Sequence: Synthetic peptide
GSSSTY

SEQ ID NO: 689 - protein, 8 aa, synthetic construct
  REGION 1..8: note = Description of Artificial Sequence: Synthetic peptide
DGELGPFE

SEQ ID NO: 690 - protein, 8 aa, synthetic construct
  REGION 1..8: note = Description of Artificial Sequence: Synthetic peptide
SQSVSTSY

SEQ ID NO: 691 - skipped

SEQ ID NO: 692 - protein, 6 aa, synthetic construct
  REGION 1..6: note = Description of Artificial Sequence: Synthetic peptide
YGRSPL

SEQ ID NO: 693 - protein, 10 aa, synthetic construct
  REGION 1..10: note = Description of Artificial Sequence: Synthetic peptide
GFTFSSYSMY

SEQ ID NO: 694 - protein, 10 aa, synthetic construct
  REGION 1..10: note = Description of Artificial Sequence: Synthetic peptide
SIGSSSTYIF

SEQ ID NO: 695 - protein, 9 aa, synthetic construct
  REGION 1..9: note = Description of Artificial Sequence: Synthetic peptide
DGELGPFEY

SEQ ID NO: 696 - protein, 12 aa, synthetic construct
  REGION 1..12: note = Description of Artificial Sequence: Synthetic peptide
RASQSVSTSYLA

SEQ ID NO: 697 - protein, 7 aa, synthetic construct
  REGION 1..7: note = Description of Artificial Sequence: Synthetic peptide
GTSSRAT

SEQ ID NO: 698 - protein, 9 aa, synthetic construct
  REGION 1..9: note = Description of Artificial Sequence: Synthetic peptide
LQYGRSPLT

SEQ ID NO: 699 - protein, 6 aa, synthetic construct
  REGION 1..6: note = Description of Artificial Sequence: Synthetic peptide
SSYSMY

SEQ ID NO: 700 - protein, 13 aa, synthetic construct
  REGION 1..13: note = Description of Artificial Sequence: Synthetic peptide
WVSSIGSSSTYIF

SEQ ID NO: 701 - protein, 10 aa, synthetic construct
  REGION 1..10: note = Description of Artificial Sequence: Synthetic peptide
ARDGELGPFE

SEQ ID NO: 702 - protein, 8 aa, synthetic construct
  REGION 1..8: note = Description of Artificial Sequence: Synthetic peptide
STSYLAWF

SEQ ID NO: 703 - protein, 10 aa, synthetic construct
  REGION 1..10: note = Description of Artificial Sequence: Synthetic peptide
LLIFGTSSRA

SEQ ID NO: 704 - protein, 8 aa, synthetic construct
  REGION 1..8: note = Description of Artificial Sequence: Synthetic peptide
LQYGRSPL

SEQ ID NO: 705 - protein, 8 aa, synthetic construct
  REGION 1..8: note = Description of Artificial Sequence: Synthetic peptide
GFTFSSYS

SEQ ID NO: 706 - protein, 8 aa, synthetic construct
  REGION 1..8: note = Description of Artificial Sequence: Synthetic peptide
IGSSSTYI

SEQ ID NO: 707 - protein, 11 aa, synthetic construct
  REGION 1..11: note = Description of Artificial Sequence: Synthetic peptide
ARDGELGPFEY

SEQ ID NO: 708 - protein, 7 aa, synthetic construct
  REGION 1..7: note = Description of Artificial Sequence: Synthetic peptide
QSVSTSY

SEQ ID NO: 709 - skipped

SEQ ID NO: 710 - protein, 9 aa, synthetic construct
  REGION 1..9: note = Description of Artificial Sequence: Synthetic peptide
LQYGRSPLT

SEQ ID NO: 711 - protein, 118 aa, synthetic construct
  REGION 1..118: note = Description of Artificial Sequence: Synthetic polypeptide
EVQLVQSGGDLVKSGGSLRLSCAASGFTFSSYSMYWVRQAPGKGLEWVSSIGSSSTYIFYADSVKGRFTISRDNAMTSLYLQMNRLGAEDSAVYYCARDGELGPFEYWGQGTLVTVSS

SEQ ID NO: 712 - protein, 108 aa, synthetic construct
  REGION 1..108: note = Description of Artificial Sequence: Synthetic polypeptide
EIVLTQSPGTLSLSPGERATLSCRASQSVSTSYLAWFQQKPGQAPRLLIFGTSSRATGIPDRFSGSGSGTDFTLTISRLEPEDFAVYHCLQYGRSPLTFGGGTKVDIK

SEQ ID NO: 713 - protein, 448 aa, synthetic construct
  REGION 1..448: note = Description of Artificial Sequence: Synthetic polypeptide
EVQLVQSGGDLVKSGGSLRLSCAASGFTFSSYSMYWVRQAPGKGLEWVSSIGSSSTYIFYADSVKGRFTISRDNAMTSLYLQMNRLGAEDSAVYYCARDGELGPFEYWGQGTLVTVSSASTKGPSVFPLAPSSKSTSGGTAALGCLVKDYFPEPVTVSWNSGALTSGVHTFPAVLQSSGLYSLSSVVTVPSSSLGTQTYICNVNHKPSNTKVDKKVEPKSCDKTHTCPPCPAPELLGGPSVFLFPPKPKDTLMISRTPEVTCVVVDVSHEDPEVKFNWYVDGVEVHNAKTKPREEQYNSTYRVVSVLTVLHQDWLNGKEYKCKVSNKALPAPIEKTISKAKGQPREPQVYTLPPSREEMTKNQVSLTCLVKGFYPSDIAVEWESNGQPENNYKTTPPVLDSDGSFFLYSKLTVDKSRWQQGNVFSCSVMHEALHNHYTQKSLSLSPGK

SEQ ID NO: 714 - protein, 215 aa, synthetic construct
  REGION 1..215: note = Description of Artificial Sequence: Synthetic polypeptide
EIVLTQSPGTLSLSPGERATLSCRASQSVSTSYLAWFQQKPGQAPRLLIFGTSSRATGIPDRFSGSGSGTDFTLTISRLEPEDFAVYHCLQYGRSPLTFGGGTKVDIKRTVAAPSVFIFPPSDEQLKSGTASVVCLLNNFYPREAKVQWKVDNALQSGNSQESVTEQDSKDSTYSLSSTLTLSKADYEKHKVYACEVTHQGLSSPVTKSFNRGEC

SEQ ID NO: 715 - protein, 5 aa, synthetic construct
  REGION 1..5: note = Description of Artificial Sequence: Synthetic peptide
NYDMN

SEQ ID NO: 716 - protein, 17 aa, synthetic construct
  REGION 1..17: note = Description of Artificial Sequence: Synthetic peptide
SISSSSSYIYYADSVKG

SEQ ID NO: 717 - protein, 17 aa, synthetic construct
  REGION 1..17: note = Description of Artificial Sequence: Synthetic peptide
EIGVTGTTYYQDYGMDV

SEQ ID NO: 718 - protein, 12 aa, synthetic construct
  REGION 1..12: note = Description of Artificial Sequence: Synthetic peptide
RASQSFSSNYLA

SEQ ID NO: 719 - protein, 7 aa, synthetic construct
  REGION 1..7: note = Description of Artificial Sequence: Synthetic peptide
GASSRAT

SEQ ID NO: 720 - protein, 10 aa, synthetic construct
  REGION 1..10: note = Description of Artificial Sequence: Synthetic peptide
QQYGSSPPFT

SEQ ID NO: 721 - protein, 7 aa, synthetic construct
  REGION 1..7: note = Description of Artificial Sequence: Synthetic peptide
GFTFSNY

SEQ ID NO: 722 - protein, 6 aa, synthetic construct
  REGION 1..6: note = Description of Artificial Sequence: Synthetic peptide
SSSSSY

SEQ ID NO: 723 - protein, 16 aa, synthetic construct
  REGION 1..16: note = Description of Artificial Sequence: Synthetic peptide
EIGVTGTTYYQDYGMD

SEQ ID NO: 724 - protein, 8 aa, synthetic construct
  REGION 1..8: note = Description of Artificial Sequence: Synthetic peptide
SQSFSSNY

SEQ ID NO: 725 - skipped

SEQ ID NO: 726 - protein, 7 aa, synthetic construct
  REGION 1..7: note = Description of Artificial Sequence: Synthetic peptide
YGSSPPF

SEQ ID NO: 727 - protein, 10 aa, synthetic construct
  REGION 1..10: note = Description of Artificial Sequence: Synthetic peptide
GFTFSNYDMN

SEQ ID NO: 728 - protein, 10 aa, synthetic construct
  REGION 1..10: note = Description of Artificial Sequence: Synthetic peptide
SISSSSSYIY

SEQ ID NO: 729 - protein, 17 aa, synthetic construct
  REGION 1..17: note = Description of Artificial Sequence: Synthetic peptide
EIGVTGTTYYQDYGMDV

SEQ ID NO: 730 - protein, 12 aa, synthetic construct
  REGION 1..12: note = Description of Artificial Sequence: Synthetic peptide
RASQSFSSNYLA

SEQ ID NO: 731 - protein, 7 aa, synthetic construct
  REGION 1..7: note = Description of Artificial Sequence: Synthetic peptide
GASSRAT

SEQ ID NO: 732 - protein, 10 aa, synthetic construct
  REGION 1..10: note = Description of Artificial Sequence: Synthetic peptide
QQYGSSPPFT

SEQ ID NO: 733 - protein, 6 aa, synthetic construct
  REGION 1..6: note = Description of Artificial Sequence: Synthetic peptide
SNYDMN

SEQ ID NO: 734 - protein, 13 aa, synthetic construct
  REGION 1..13: note = Description of Artificial Sequence: Synthetic peptide
WVSSISSSSSYIY

SEQ ID NO: 735 - protein, 18 aa, synthetic construct
  REGION 1..18: note = Description of Artificial Sequence: Synthetic peptide
AREIGVTGTTYYQDYGMD

SEQ ID NO: 736 - protein, 8 aa, synthetic construct
  REGION 1..8: note = Description of Artificial Sequence: Synthetic peptide
SSNYLAWY

SEQ ID NO: 737 - protein, 10 aa, synthetic construct
  REGION 1..10: note = Description of Artificial Sequence: Synthetic peptide
LLIYGASSRA

SEQ ID NO: 738 - protein, 9 aa, synthetic construct
  REGION 1..9: note = Description of Artificial Sequence: Synthetic peptide
QQYGSSPPF

SEQ ID NO: 739 - protein, 8 aa, synthetic construct
  REGION 1..8: note = Description of Artificial Sequence: Synthetic peptide
GFTFSNYD

SEQ ID NO: 740 - protein, 8 aa, synthetic construct
  REGION 1..8: note = Description of Artificial Sequence: Synthetic peptide
ISSSSSYI

SEQ ID NO: 741 - protein, 19 aa, synthetic construct
  REGION 1..19: note = Description of Artificial Sequence: Synthetic peptide
AREIGVTGTTYYQDYGMDV

SEQ ID NO: 742 - protein, 7 aa, synthetic construct
  REGION 1..7: note = Description of Artificial Sequence: Synthetic peptide
QSFSSNY

SEQ ID NO: 743 - skipped

SEQ ID NO: 744 - protein, 10 aa, synthetic construct
  REGION 1..10: note = Description of Artificial Sequence: Synthetic peptide
QQYGSSPPFT

SEQ ID NO: 745 - protein, 126 aa, synthetic construct
  REGION 1..126: note = Description of Artificial Sequence: Synthetic polypeptide
EVQLVQSGGGLVKPGGSLRLSCAASGFTFSNYDMNWVRQAPGKGLEWVSSISSSSSYIYYADSVKGRFTISRDNARNSLFLQMSSLRAEDTAVYYCAREIGVTGTTYYQDYGMDVWGQGTTVTVSS

SEQ ID NO: 746 - protein, 109 aa, synthetic construct
  REGION 1..109: note = Description of Artificial Sequence: Synthetic polypeptide
EIVMTQSPGTLSLSPGERATLSCRASQSFSSNYLAWYQQKPGQAPRLLIYGASSRATGIPDRFSGSGSGTDFTLTISRLEPEDFALYYCQQYGSSPPFTFGQGTKVEIK

SEQ ID NO: 747 - protein, 456 aa, synthetic construct
  REGION 1..456: note = Description of Artificial Sequence: Synthetic polypeptide
EVQLVQSGGGLVKPGGSLRLSCAASGFTFSNYDMNWVRQAPGKGLEWVSSISSSSSYIYYADSVKGRFTISRDNARNSLFLQMSSLRAEDTAVYYCAREIGVTGTTYYQDYGMDVWGQGTTVTVSSASTKGPSVFPLAPSSKSTSGGTAALGCLVKDYFPEPVTVSWNSGALTSGVHTFPAVLQSSGLYSLSSVVTVPSSSLGTQTYICNVNHKPSNTKVDKKVEPKSCDKTHTCPPCPAPELLGGPSVFLFPPKPKDTLMISRTPEVTCVVVDVSHEDPEVKFNWYVDGVEVHNAKTKPREEQYNSTYRVVSVLTVLHQDWLNGKEYKCKVSNKALPAPIEKTISKAKGQPREPQVYTLPPSREEMTKNQVSLTCLVKGFYPSDIAVEWESNGQPENNYKTTPPVLDSDGSFFLYSKLTVDKSRWQQGNVFSCSVMHEALHNHYTQKSLSLSPGK

SEQ ID NO: 748 - protein, 216 aa, synthetic construct
  REGION 1..216: note = Description of Artificial Sequence: Synthetic polypeptide
EIVMTQSPGTLSLSPGERATLSCRASQSFSSNYLAWYQQKPGQAPRLLIYGASSRATGIPDRFSGSGSGTDFTLTISRLEPEDFALYYCQQYGSSPPFTFGQGTKVEIKRTVAAPSVFIFPPSDEQLKSGTASVVCLLNNFYPREAKVQWKVDNALQSGNSQESVTEQDSKDSTYSLSSTLTLSKADYEKHKVYACEVTHQGLSSPVTKSFNRGEC

SEQ ID NO: 749 - protein, 5 aa, synthetic construct
  REGION 1..5: note = Description of Artificial Sequence: Synthetic peptide
NYDMN

SEQ ID NO: 750 - protein, 17 aa, synthetic construct
  REGION 1..17: note = Description of Artificial Sequence: Synthetic peptide
SISSSSSYIYYADSVKG

SEQ ID NO: 751 - protein, 17 aa, synthetic construct
  REGION 1..17: note = Description of Artificial Sequence: Synthetic peptide
DLGITGTTMDYYYGMDV

SEQ ID NO: 752 - protein, 12 aa, synthetic construct
  REGION 1..12: note = Description of Artificial Sequence: Synthetic peptide
RASQSVSSSYLA

SEQ ID NO: 753 - protein, 7 aa, synthetic construct
  REGION 1..7: note = Description of Artificial Sequence: Synthetic peptide
GASSRAT

SEQ ID NO: 754 - protein, 10 aa, synthetic construct
  REGION 1..10: note = Description of Artificial Sequence: Synthetic peptide
QQYGSSPPYT

SEQ ID NO: 755 - protein, 7 aa, synthetic construct
  REGION 1..7: note = Description of Artificial Sequence: Synthetic peptide
GFTFSNY

SEQ ID NO: 756 - protein, 6 aa, synthetic construct
  REGION 1..6: note = Description of Artificial Sequence: Synthetic peptide
SSSSSY

SEQ ID NO: 757 - protein, 16 aa, synthetic construct
  REGION 1..16: note = Description of Artificial Sequence: Synthetic peptide
DLGITGTTMDYYYGMD

SEQ ID NO: 758 - protein, 8 aa, synthetic construct
  REGION 1..8: note = Description of Artificial Sequence: Synthetic peptide
SQSVSSSY

SEQ ID NO: 759 - skipped

SEQ ID NO: 760 - protein, 7 aa, synthetic construct
  REGION 1..7: note = Description of Artificial Sequence: Synthetic peptide
YGSSPPY

SEQ ID NO: 761 - protein, 10 aa, synthetic construct
  REGION 1..10: note = Description of Artificial Sequence: Synthetic peptide
GFTFSNYDMN

SEQ ID NO: 762 - protein, 10 aa, synthetic construct
  REGION 1..10: note = Description of Artificial Sequence: Synthetic peptide
SISSSSSYIY

SEQ ID NO: 763 - protein, 17 aa, synthetic construct
  REGION 1..17: note = Description of Artificial Sequence: Synthetic peptide
DLGITGTTMDYYYGMDV

SEQ ID NO: 764 - protein, 12 aa, synthetic construct
  REGION 1..12: note = Description of Artificial Sequence: Synthetic peptide
RASQSVSSSYLA

SEQ ID NO: 765 - protein, 7 aa, synthetic construct
  REGION 1..7: note = Description of Artificial Sequence: Synthetic peptide
GASSRAT

SEQ ID NO: 766 - protein, 10 aa, synthetic construct
  REGION 1..10: note = Description of Artificial Sequence: Synthetic peptide
QQYGSSPPYT

SEQ ID NO: 767 - protein, 6 aa, synthetic construct
  REGION 1..6: note = Description of Artificial Sequence: Synthetic peptide
SNYDMN

SEQ ID NO: 768 - protein, 13 aa, synthetic construct
  REGION 1..13: note = Description of Artificial Sequence: Synthetic peptide
WVSSISSSSSYIY

SEQ ID NO: 769 - protein, 18 aa, synthetic construct
  REGION 1..18: note = Description of Artificial Sequence: Synthetic peptide
ARDLGITGTTMDYYYGMD

SEQ ID NO: 770 - protein, 8 aa, synthetic construct
  REGION 1..8: note = Description of Artificial Sequence: Synthetic peptide
SSSYLAWY

SEQ ID NO: 771 - protein, 10 aa, synthetic construct
  REGION 1..10: note = Description of Artificial Sequence: Synthetic peptide
LLIYGASSRA

SEQ ID NO: 772 - protein, 9 aa, synthetic construct
  REGION 1..9: note = Description of Artificial Sequence: Synthetic peptide
QQYGSSPPY

SEQ ID NO: 773 - protein, 8 aa, synthetic construct
  REGION 1..8: note = Description of Artificial Sequence: Synthetic peptide
GFTFSNYD

SEQ ID NO: 774 - protein, 8 aa, synthetic construct
  REGION 1..8: note = Description of Artificial Sequence: Synthetic peptide
ISSSSSYI

SEQ ID NO: 775 - protein, 19 aa, synthetic construct
  REGION 1..19: note = Description of Artificial Sequence: Synthetic peptide
ARDLGITGTTMDYYYGMDV

SEQ ID NO: 776 - protein, 7 aa, synthetic construct
  REGION 1..7: note = Description of Artificial Sequence: Synthetic peptide
QSVSSSY

SEQ ID NO: 777 - skipped

SEQ ID NO: 778 - protein, 10 aa, synthetic construct
  REGION 1..10: note = Description of Artificial Sequence: Synthetic peptide
QQYGSSPPYT

SEQ ID NO: 779 - protein, 126 aa, synthetic construct
  REGION 1..126: note = Description of Artificial Sequence: Synthetic polypeptide
EVQLVESGGGLVKPGGSLRLSCAAAGFTFSNYDMNWVRQVPGKGLEWVSSISSSSSYIYYADSVKGRFTISRDNAKNSLYLQMNTLRAEDTAVYYCARDLGITGTTMDYYYGMDVWGQGTMVTVSS

SEQ ID NO: 780 - protein, 109 aa, synthetic construct
  REGION 1..109: note = Description of Artificial Sequence: Synthetic polypeptide
EIVMTQSPGTLSLSPGERATLSCRASQSVSSSYLAWYQQKPGQAPRLLIYGASSRATGIPDRFSGSGSGTDFTLTISRLEPEDFAVYYCQQYGSSPPYTFGQGTKVDIK

SEQ ID NO: 781 - protein, 456 aa, synthetic construct
  REGION 1..456: note = Description of Artificial Sequence: Synthetic polypeptide
EVQLVESGGGLVKPGGSLRLSCAAAGFTFSNYDMNWVRQVPGKGLEWVSSISSSSSYIYYADSVKGRFTISRDNAKNSLYLQMNTLRAEDTAVYYCARDLGITGTTMDYYYGMDVWGQGTMVTVSSASTKGPSVFPLAPSSKSTSGGTAALGCLVKDYFPEPVTVSWNSGALTSGVHTFPAVLQSSGLYSLSSVVTVPSSSLGTQTYICNVNHKPSNTKVDKKVEPKSCDKTHTCPPCPAPELLGGPSVFLFPPKPKDTLMISRTPEVTCVVVDVSHEDPEVKFNWYVDGVEVHNAKTKPREEQYNSTYRVVSVLTVLHQDWLNGKEYKCKVSNKALPAPIEKTISKAKGQPREPQVYTLPPSREEMTKNQVSLTCLVKGFYPSDIAVEWESNGQPENNYKTTPPVLDSDGSFFLYSKLTVDKSRWQQGNVFSCSVMHEALHNHYTQKSLSLSPGK

SEQ ID NO: 782 - protein, 216 aa, synthetic construct
  REGION 1..216: note = Description of Artificial Sequence: Synthetic polypeptide
EIVMTQSPGTLSLSPGERATLSCRASQSVSSSYLAWYQQKPGQAPRLLIYGASSRATGIPDRFSGSGSGTDFTLTISRLEPEDFAVYYCQQYGSSPPYTFGQGTKVDIKRTVAAPSVFIFPPSDEQLKSGTASVVCLLNNFYPREAKVQWKVDNALQSGNSQESVTEQDSKDSTYSLSSTLTLSKADYEKHKVYACEVTHQGLSSPVTKSFNRGEC

SEQ ID NO: 783 - protein, 5 aa, synthetic construct
  REGION 1..5: note = Description of Artificial Sequence: Synthetic peptide
SYDMN

SEQ ID NO: 784 - protein, 17 aa, synthetic construct
  REGION 1..17: note = Description of Artificial Sequence: Synthetic peptide
SISSSSSYIYYADSVKG

SEQ ID NO: 785 - protein, 15 aa, synthetic construct
  REGION 1..15: note = Description of Artificial Sequence: Synthetic peptide
DRGIGGDYYSYAMDV

SEQ ID NO: 786 - protein, 12 aa, synthetic construct
  REGION 1..12: note = Description of Artificial Sequence: Synthetic peptide
RASQSVSSSYLA

SEQ ID NO: 787 - protein, 7 aa, synthetic construct
  REGION 1..7: note = Description of Artificial Sequence: Synthetic peptide
GASSRAT

SEQ ID NO: 788 - protein, 10 aa, synthetic construct
  REGION 1..10: note = Description of Artificial Sequence: Synthetic peptide
QQYGSSPPYT

SEQ ID NO: 789 - protein, 7 aa, synthetic construct
  REGION 1..7: note = Description of Artificial Sequence: Synthetic peptide
GFTFNSY

SEQ ID NO: 790 - protein, 6 aa, synthetic construct
  REGION 1..6: note = Description of Artificial Sequence: Synthetic peptide
SSSSSY

SEQ ID NO: 791 - protein, 14 aa, synthetic construct
  REGION 1..14: note = Description of Artificial Sequence: Synthetic peptide
DRGIGGDYYSYAMD

SEQ ID NO: 792 - protein, 8 aa, synthetic construct
  REGION 1..8: note = Description of Artificial Sequence: Synthetic peptide
SQSVSSSY

SEQ ID NO: 793 - skipped

SEQ ID NO: 794 - protein, 7 aa, synthetic construct
  REGION 1..7: note = Description of Artificial Sequence: Synthetic peptide
YGSSPPY

SEQ ID NO: 795 - protein, 10 aa, synthetic construct
  REGION 1..10: note = Description of Artificial Sequence: Synthetic peptide
GFTFNSYDMN

SEQ ID NO: 796 - protein, 10 aa, synthetic construct
  REGION 1..10: note = Description of Artificial Sequence: Synthetic peptide
SISSSSSYIY

SEQ ID NO: 797 - protein, 15 aa, synthetic construct
  REGION 1..15: note = Description of Artificial Sequence: Synthetic peptide
DRGIGGDYYSYAMDV

SEQ ID NO: 798 - protein, 12 aa, synthetic construct
  REGION 1..12: note = Description of Artificial Sequence: Synthetic peptide
RASQSVSSSYLA

SEQ ID NO: 799 - protein, 7 aa, synthetic construct
  REGION 1..7: note = Description of Artificial Sequence: Synthetic peptide
GASSRAT

SEQ ID NO: 800 - protein, 10 aa, synthetic construct
  REGION 1..10: note = Description of Artificial Sequence: Synthetic peptide
QQYGSSPPYT

SEQ ID NO: 801 - protein, 6 aa, synthetic construct
  REGION 1..6: note = Description of Artificial Sequence: Synthetic peptide
NSYDMN

SEQ ID NO: 802 - protein, 13 aa, synthetic construct
  REGION 1..13: note = Description of Artificial Sequence: Synthetic peptide
WVSSISSSSSYIY

SEQ ID NO: 803 - protein, 16 aa, synthetic construct
  REGION 1..16: note = Description of Artificial Sequence: Synthetic peptide
ARDRGIGGDYYSYAMD

SEQ ID NO: 804 - protein, 8 aa, synthetic construct
  REGION 1..8: note = Description of Artificial Sequence: Synthetic peptide
SSSYLAWY

SEQ ID NO: 805 - protein, 10 aa, synthetic construct
  REGION 1..10: note = Description of Artificial Sequence: Synthetic peptide
LLIYGASSRA

SEQ ID NO: 806 - protein, 9 aa, synthetic construct
  REGION 1..9: note = Description of Artificial Sequence: Synthetic peptide
QQYGSSPPY

SEQ ID NO: 807 - protein, 8 aa, synthetic construct
  REGION 1..8: note = Description of Artificial Sequence: Synthetic peptide
GFTFNSYD

SEQ ID NO: 808 - protein, 8 aa, synthetic construct
  REGION 1..8: note = Description of Artificial Sequence: Synthetic peptide
ISSSSSYI

SEQ ID NO: 809 - protein, 17 aa, synthetic construct
  REGION 1..17: note = Description of Artificial Sequence: Synthetic peptide
ARDRGIGGDYYSYAMDV

SEQ ID NO: 810 - protein, 7 aa, synthetic construct
  REGION 1..7: note = Description of Artificial Sequence: Synthetic peptide
QSVSSSY

SEQ ID NO: 811 - skipped

SEQ ID NO: 812 - protein, 10 aa, synthetic construct
  REGION 1..10: note = Description of Artificial Sequence: Synthetic peptide
QQYGSSPPYT

SEQ ID NO: 813 - protein, 124 aa, synthetic construct
  REGION 1..124: note = Description of Artificial Sequence: Synthetic polypeptide
EVQLVESGGGLVKPGGSLRLSCAASGFTFNSYDMNWVRQAPGKGLEWVSSISSSSSYIYYADSVKGRCTISRDNARNSLYLQMNSLRAEDTAIYYCARDRGIGGDYYSYAMDVWGQGTMVTVSS

SEQ ID NO: 814 - protein, 109 aa, synthetic construct
  REGION 1..109: note = Description of Artificial Sequence: Synthetic polypeptide
EIVLTQSPGTLSLSPGERATLSCRASQSVSSSYLAWYQQKPGQAPRLLIYGASSRATGIPDRFSGSGSGTDFTLTISRLEPEDFAVYYCQQYGSSPPYTFGQGTKLEIK

SEQ ID NO: 815 - protein, 454 aa, synthetic construct
  REGION 1..454: note = Description of Artificial Sequence: Synthetic polypeptide
EVQLVESGGGLVKPGGSLRLSCAASGFTFNSYDMNWVRQAPGKGLEWVSSISSSSSYIYYADSVKGRCTISRDNARNSLYLQMNSLRAEDTAIYYCARDRGIGGDYYSYAMDVWGQGTMVTVSSASTKGPSVFPLAPSSKSTSGGTAALGCLVKDYFPEPVTVSWNSGALTSGVHTFPAVLQSSGLYSLSSVVTVPSSSLGTQTYICNVNHKPSNTKVDKKVEPKSCDKTHTCPPCPAPELLGGPSVFLFPPKPKDTLMISRTPEVTCVVVDVSHEDPEVKFNWYVDGVEVHNAKTKPREEQYNSTYRVVSVLTVLHQDWLNGKEYKCKVSNKALPAPIEKTISKAKGQPREPQVYTLPPSREEMTKNQVSLTCLVKGFYPSDIAVEWESNGQPENNYKTTPPVLDSDGSFFLYSKLTVDKSRWQQGNVFSCSVMHEALHNHYTQKSLSLSPGK

SEQ ID NO: 816 - protein, 216 aa, synthetic construct
  REGION 1..216: note = Description of Artificial Sequence: Synthetic polypeptide
EIVLTQSPGTLSLSPGERATLSCRASQSVSSSYLAWYQQKPGQAPRLLIYGASSRATGIPDRFSGSGSGTDFTLTISRLEPEDFAVYYCQQYGSSPPYTFGQGTKLEIKRTVAAPSVFIFPPSDEQLKSGTASVVCLLNNFYPREAKVQWKVDNALQSGNSQESVTEQDSKDSTYSLSSTLTLSKADYEKHKVYACEVTHQGLSSPVTKSFNRGEC

SEQ ID NO: 817 - protein, 5 aa, synthetic construct
  REGION 1..5: note = Description of Artificial Sequence: Synthetic peptide
NYDMN

SEQ ID NO: 818 - protein, 17 aa, synthetic construct
  REGION 1..17: note = Description of Artificial Sequence: Synthetic peptide
SISSSSSYIYYADSVKG

SEQ ID NO: 819 - protein, 15 aa, synthetic construct
  REGION 1..15: note = Description of Artificial Sequence: Synthetic peptide
DVGVTTDYYYYGMDV

SEQ ID NO: 820 - protein, 12 aa, synthetic construct
  REGION 1..12: note = Description of Artificial Sequence: Synthetic peptide
RASQSVASSYLA

SEQ ID NO: 821 - protein, 7 aa, synthetic construct
  REGION 1..7: note = Description of Artificial Sequence: Synthetic peptide
GASSRAT

SEQ ID NO: 822 - protein, 10 aa, synthetic construct
  REGION 1..10: note = Description of Artificial Sequence: Synthetic peptide
QQYGSSPPYT

SEQ ID NO: 823 - protein, 7 aa, synthetic construct
  REGION 1..7: note = Description of Artificial Sequence: Synthetic peptide
GFTFSNY

SEQ ID NO: 824 - protein, 6 aa, synthetic construct
  REGION 1..6: note = Description of Artificial Sequence: Synthetic peptide
SSSSSY

SEQ ID NO: 825 - protein, 14 aa, synthetic construct
  REGION 1..14: note = Description of Artificial Sequence: Synthetic peptide
DVGVTTDYYYYGMD

SEQ ID NO: 826 - protein, 8 aa, synthetic construct
  REGION 1..8: note = Description of Artificial Sequence: Synthetic peptide
SQSVASSY

SEQ ID NO: 827 - skipped

SEQ ID NO: 828 - protein, 7 aa, synthetic construct
  REGION 1..7: note = Description of Artificial Sequence: Synthetic peptide
YGSSPPY

SEQ ID NO: 829 - protein, 10 aa, synthetic construct
  REGION 1..10: note = Description of Artificial Sequence: Synthetic peptide
GFTFSNYDMN

SEQ ID NO: 830 - protein, 10 aa, synthetic construct
  REGION 1..10: note = Description of Artificial Sequence: Synthetic peptide
SISSSSSYIY

SEQ ID NO: 831 - protein, 15 aa, synthetic construct
  REGION 1..15: note = Description of Artificial Sequence: Synthetic peptide
DVGVTTDYYYYGMDV

SEQ ID NO: 832 - protein, 12 aa, synthetic construct
  REGION 1..12: note = Description of Artificial Sequence: Synthetic peptide
RASQSVASSYLA

SEQ ID NO: 833 - protein, 7 aa, synthetic construct
  REGION 1..7: note = Description of Artificial Sequence: Synthetic peptide
GASSRAT

SEQ ID NO: 834 - protein, 10 aa, synthetic construct
  REGION 1..10: note = Description of Artificial Sequence: Synthetic peptide
QQYGSSPPYT

SEQ ID NO: 835 - protein, 6 aa, synthetic construct
  REGION 1..6: note = Description of Artificial Sequence: Synthetic peptide
SNYDMN

SEQ ID NO: 836 - protein, 13 aa, synthetic construct
  REGION 1..13: note = Description of Artificial Sequence: Synthetic peptide
WVSSISSSSSYIY

SEQ ID NO: 837 - protein, 16 aa, synthetic construct
  REGION 1..16: note = Description of Artificial Sequence: Synthetic peptide
ARDVGVTTDYYYYGMD

SEQ ID NO: 838 - protein, 8 aa, synthetic construct
  REGION 1..8: note = Description of Artificial Sequence: Synthetic peptide
ASSYLAWY

SEQ ID NO: 839 - protein, 10 aa, synthetic construct
  REGION 1..10: note = Description of Artificial Sequence: Synthetic peptide
LLIYGASSRA

SEQ ID NO: 840 - protein, 9 aa, synthetic construct
  REGION 1..9: note = Description of Artificial Sequence: Synthetic peptide
QQYGSSPPY

SEQ ID NO: 841 - protein, 8 aa, synthetic construct
  REGION 1..8: note = Description of Artificial Sequence: Synthetic peptide
GFTFSNYD

SEQ ID NO: 842 - protein, 8 aa, synthetic construct
  REGION 1..8: note = Description of Artificial Sequence: Synthetic peptide
ISSSSSYI

SEQ ID NO: 843 - protein, 17 aa, synthetic construct
  REGION 1..17: note = Description of Artificial Sequence: Synthetic peptide
ARDVGVTTDYYYYGMDV

SEQ ID NO: 844 - protein, 7 aa, synthetic construct
  REGION 1..7: note = Description of Artificial Sequence: Synthetic peptide
QSVASSY

SEQ ID NO: 845 - skipped

SEQ ID NO: 846 - protein, 10 aa, synthetic construct
  REGION 1..10: note = Description of Artificial Sequence: Synthetic peptide
QQYGSSPPYT

SEQ ID NO: 847 - protein, 124 aa, synthetic construct; identical to SEQ ID NO: 201
  REGION 1..124: note = Description of Artificial Sequence: Synthetic polypeptide

SEQ ID NO: 848 - protein, 109 aa, synthetic construct; identical to SEQ ID NO: 440
  REGION 1..109: note = Description of Artificial Sequence: Synthetic polypeptide

SEQ ID NO: 849 - protein, 454 aa, synthetic construct; identical to SEQ ID NO: 203
  REGION 1..454: note = Description of Artificial Sequence: Synthetic polypeptide

SEQ ID NO: 850 - protein, 216 aa, synthetic construct; identical to SEQ ID NO: 442
  REGION 1..216: note = Description of Artificial Sequence: Synthetic polypeptide

SEQ ID NO: 851 - protein, 5 aa, synthetic construct
  REGION 1..5: note = Description of Artificial Sequence: Synthetic peptide
NYDMN

SEQ ID NO: 852 - protein, 17 aa, synthetic construct
  REGION 1..17: note = Description of Artificial Sequence: Synthetic peptide
SISSSSSYIYYADSVKG

SEQ ID NO: 853 - protein, 15 aa, synthetic construct
  REGION 1..15: note = Description of Artificial Sequence: Synthetic peptide
DVGVTTDYYYYGMDV

SEQ ID NO: 854 - protein, 12 aa, synthetic construct
  REGION 1..12: note = Description of Artificial Sequence: Synthetic peptide
RASQSVASSYLA

SEQ ID NO: 855 - protein, 7 aa, synthetic construct
  REGION 1..7: note = Description of Artificial Sequence: Synthetic peptide
GASSRAT

SEQ ID NO: 856 - protein, 10 aa, synthetic construct
  REGION 1..10: note = Description of Artificial Sequence: Synthetic peptide
QQYGSSPPYT

SEQ ID NO: 857 - protein, 7 aa, synthetic construct
  REGION 1..7: note = Description of Artificial Sequence: Synthetic peptide
GFTFSNY

SEQ ID NO: 858 - protein, 6 aa, synthetic construct
  REGION 1..6: note = Description of Artificial Sequence: Synthetic peptide
SSSSSY

SEQ ID NO: 859 - protein, 14 aa, synthetic construct
  REGION 1..14: note = Description of Artificial Sequence: Synthetic peptide
DVGVTTDYYYYGMD

SEQ ID NO: 860 - protein, 8 aa, synthetic construct
  REGION 1..8: note = Description of Artificial Sequence: Synthetic peptide
SQSVASSY

SEQ ID NO: 861 - skipped

SEQ ID NO: 862 - protein, 7 aa, synthetic construct
  REGION 1..7: note = Description of Artificial Sequence: Synthetic peptide
YGSSPPY

SEQ ID NO: 863 - protein, 10 aa, synthetic construct
  REGION 1..10: note = Description of Artificial Sequence: Synthetic peptide
GFTFSNYDMN

SEQ ID NO: 864 - protein, 10 aa, synthetic construct
  REGION 1..10: note = Description of Artificial Sequence: Synthetic peptide
SISSSSSYIY

SEQ ID NO: 865 - protein, 15 aa, synthetic construct
  REGION 1..15: note = Description of Artificial Sequence: Synthetic peptide
DVGVTTDYYYYGMDV

SEQ ID NO: 866 - protein, 12 aa, synthetic construct
  REGION 1..12: note = Description of Artificial Sequence: Synthetic peptide
RASQSVASSYLA

SEQ ID NO: 867 - protein, 7 aa, synthetic construct
  REGION 1..7: note = Description of Artificial Sequence: Synthetic peptide
GASSRAT

SEQ ID NO: 868 - protein, 10 aa, synthetic construct
  REGION 1..10: note = Description of Artificial Sequence: Synthetic peptide
QQYGSSPPYT

SEQ ID NO: 869 - protein, 6 aa, synthetic construct
  REGION 1..6: note = Description of Artificial Sequence: Synthetic peptide
SNYDMN

SEQ ID NO: 870 - protein, 13 aa, synthetic construct
  REGION 1..13: note = Description of Artificial Sequence: Synthetic peptide
WVSSISSSSSYIY

SEQ ID NO: 871 - protein, 16 aa, synthetic construct
  REGION 1..16: note = Description of Artificial Sequence: Synthetic peptide
ARDVGVTTDYYYYGMD

SEQ ID NO: 872 - protein, 8 aa, synthetic construct
  REGION 1..8: note = Description of Artificial Sequence: Synthetic peptide
ASSYLAWY

SEQ ID NO: 873 - protein, 10 aa, synthetic construct
  REGION 1..10: note = Description of Artificial Sequence: Synthetic peptide
LLIYGASSRA

SEQ ID NO: 874 - protein, 9 aa, synthetic construct
  REGION 1..9: note = Description of Artificial Sequence: Synthetic peptide
QQYGSSPPY

SEQ ID NO: 875 - protein, 8 aa, synthetic construct
  REGION 1..8: note = Description of Artificial Sequence: Synthetic peptide
GFTFSNYD

SEQ ID NO: 876 - protein, 8 aa, synthetic construct
  REGION 1..8: note = Description of Artificial Sequence: Synthetic peptide
ISSSSSYI

SEQ ID NO: 877 - protein, 17 aa, synthetic construct
  REGION 1..17: note = Description of Artificial Sequence: Synthetic peptide
ARDVGVTTDYYYYGMDV

SEQ ID NO: 878 - protein, 7 aa, synthetic construct
  REGION 1..7: note = Description of Artificial Sequence: Synthetic peptide
QSVASSY

SEQ ID NO: 879 - skipped

SEQ ID NO: 880 - protein, 10 aa, synthetic construct
  REGION 1..10: note = Description of Artificial Sequence: Synthetic peptide
QQYGSSPPYT

SEQ ID NO: 881 - protein, 124 aa, synthetic construct
  REGION 1..124: note = Description of Artificial Sequence: Synthetic polypeptide
QVQLVESGGGLVKPGGSLRLSCSASGFTFSNYDMNWVRQAPGKGLEWVSSISSSSSYIYYADSVKGRFTISRDNAKNSLYLQMNSLRAEDTAVYHCARDVGVTTDYYYYGMDVWGQGTTVTVSS

SEQ ID NO: 882 - protein, 109 aa, synthetic construct
  REGION 1..109: note = Description of Artificial Sequence: Synthetic polypeptide
EIVMTQSPGTLSLSPGDRATLSCRASQSVASSYLAWYQQKPGQSPRLLIYGASSRATGIPDRFSGSGSGTDFTLTISRLEPEDFAVYYCQQYGSSPPYTFGQGTRLEIK

SEQ ID NO: 883 - protein, 454 aa, synthetic construct
  REGION 1..454: note = Description of Artificial Sequence: Synthetic polypeptide
QVQLVESGGGLVKPGGSLRLSCSASGFTFSNYDMNWVRQAPGKGLEWVSSISSSSSYIYYADSVKGRFTISRDNAKNSLYLQMNSLRAEDTAVYHCARDVGVTTDYYYYGMDVWGQGTTVTVSSASTKGPSVFPLAPSSKSTSGGTAALGCLVKDYFPEPVTVSWNSGALTSGVHTFPAVLQSSGLYSLSSVVTVPSSSLGTQTYICNVNHKPSNTKVDKKVEPKSCDKTHTCPPCPAPELLGGPSVFLFPPKPKDTLMISRTPEVTCVVVDVSHEDPEVKFNWYVDGVEVHNAKTKPREEQYNSTYRVVSVLTVLHQDWLNGKEYKCKVSNKALPAPIEKTISKAKGQPREPQVYTLPPSREEMTKNQVSLTCLVKGFYPSDIAVEWESNGQPENNYKTTPPVLDSDGSFFLYSKLTVDKSRWQQGNVFSCSVMHEALHNHYTQKSLSLSPGK

SEQ ID NO: 884 - protein, 216 aa, synthetic construct
  REGION 1..216: note = Description of Artificial Sequence: Synthetic polypeptide
EIVMTQSPGTLSLSPGDRATLSCRASQSVASSYLAWYQQKPGQSPRLLIYGASSRATGIPDRFSGSGSGTDFTLTISRLEPEDFAVYYCQQYGSSPPYTFGQGTRLEIKRTVAAPSVFIFPPSDEQLKSGTASVVCLLNNFYPREAKVQWKVDNALQSGNSQESVTEQDSKDSTYSLSSTLTLSKADYEKHKVYACEVTHQGLSSPVTKSFNRGEC

SEQ ID NO: 885 - protein, 5 aa, synthetic construct
  REGION 1..5: note = Description of Artificial Sequence: Synthetic peptide
NYGMN

SEQ ID NO: 886 - protein, 17 aa, synthetic construct
  REGION 1..17: note = Description of Artificial Sequence: Synthetic peptide
YISSGSSYKYYADSMKG

SEQ ID NO: 887 - protein, 14 aa, synthetic construct
  REGION 1..14: note = Description of Artificial Sequence: Synthetic peptide
DPVVTEYYYYGMDV

SEQ ID NO: 888 - protein, 11 aa, synthetic construct
  REGION 1..11: note = Description of Artificial Sequence: Synthetic peptide
RASQGINSWLA

SEQ ID NO: 889 - protein, 7 aa, synthetic construct
  REGION 1..7: note = Description of Artificial Sequence: Synthetic peptide
AASSLQS

SEQ ID NO: 890 - protein, 9 aa, synthetic construct
  REGION 1..9: note = Description of Artificial Sequence: Synthetic peptide
QQANSFPWT

SEQ ID NO: 891 - protein, 7 aa, synthetic construct
  REGION 1..7: note = Description of Artificial Sequence: Synthetic peptide
GFTFSNY

SEQ ID NO: 892 - protein, 6 aa, synthetic construct
  REGION 1..6: note = Description of Artificial Sequence: Synthetic peptide
SSGSSY

SEQ ID NO: 893 - protein, 13 aa, synthetic construct
  REGION 1..13: note = Description of Artificial Sequence: Synthetic peptide
DPVVTEYYYYGMD

SEQ ID NO: 894 - protein, 7 aa, synthetic construct
  REGION 1..7: note = Description of Artificial Sequence: Synthetic peptide
SQGINSW

SEQ ID NO: 895 - skipped

SEQ ID NO: 896 - protein, 6 aa, synthetic construct
  REGION 1..6: note = Description of Artificial Sequence: Synthetic peptide
ANSFPW

SEQ ID NO: 897 - protein, 10 aa, synthetic construct
  REGION 1..10: note = Description of Artificial Sequence: Synthetic peptide
GFTFSNYGMN

SEQ ID NO: 898 - protein, 10 aa, synthetic construct
  REGION 1..10: note = Description of Artificial Sequence: Synthetic peptide
YISSGSSYKY

SEQ ID NO: 899 - protein, 14 aa, synthetic construct
  REGION 1..14: note = Description of Artificial Sequence: Synthetic peptide
DPVVTEYYYYGMDV

SEQ ID NO: 900 - protein, 11 aa, synthetic construct
  REGION 1..11: note = Description of Artificial Sequence: Synthetic peptide
RASQGINSWLA

SEQ ID NO: 901 - protein, 7 aa, synthetic construct
  REGION 1..7: note = Description of Artificial Sequence: Synthetic peptide
AASSLQS

SEQ ID NO: 902 - protein, 9 aa, synthetic construct
  REGION 1..9: note = Description of Artificial Sequence: Synthetic peptide
QQANSFPWT

SEQ ID NO: 903 - protein, 6 aa, synthetic construct
  REGION 1..6: note = Description of Artificial Sequence: Synthetic peptide
SNYGMN

SEQ ID NO: 904 - protein, 13 aa, synthetic construct
  REGION 1..13: note = Description of Artificial Sequence: Synthetic peptide
WVSYISSGSSYKY

SEQ ID NO: 905 - protein, 15 aa, synthetic construct
  REGION 1..15: note = Description of Artificial Sequence: Synthetic peptide
ARDPVVTEYYYYGMD

SEQ ID NO: 906 - protein, 7 aa, synthetic construct
  REGION 1..7: note = Description of Artificial Sequence: Synthetic peptide
NSWLAWY

SEQ ID NO: 907 - protein, 10 aa, synthetic construct
  REGION 1..10: note = Description of Artificial Sequence: Synthetic peptide
LLIYAASSLQ

SEQ ID NO: 908 - protein, 8 aa, synthetic construct
  REGION 1..8: note = Description of Artificial Sequence: Synthetic peptide
QQANSFPW

SEQ ID NO: 909 - protein, 8 aa, synthetic construct
  REGION 1..8: note = Description of Artificial Sequence: Synthetic peptide
GFTFSNYG

SEQ ID NO: 910 - protein, 8 aa, synthetic construct
  REGION 1..8: note = Description of Artificial Sequence: Synthetic peptide
ISSGSSYK

SEQ ID NO: 911 - protein, 16 aa, synthetic construct
  REGION 1..16: note = Description of Artificial Sequence: Synthetic peptide
ARDPVVTEYYYYGMDV

SEQ ID NO: 912 - protein, 6 aa, synthetic construct
  REGION 1..6: note = Description of Artificial Sequence: Synthetic peptide
QGINSW

SEQ ID NO: 913 - skipped

SEQ ID NO: 914 - protein, 9 aa, synthetic construct
  REGION 1..9: note = Description of Artificial Sequence: Synthetic peptide
QQANSFPWT

SEQ ID NO: 915 - protein, 123 aa, synthetic construct
  REGION 1..123: note = Description of Artificial Sequence: Synthetic polypeptide
EVQLVESGGGLVKPGGSLRLSCAASGFTFSNYGMNWVRQAPGKGLEWVSYISSGSSYKYYADSMKGRFTISRDNAMNLLYLQMNSLRPEDSAMYYCARDPVVTEYYYYGMDVWGQGTTVTVSS

SEQ ID NO: 916 - protein, 107 aa, synthetic construct
  REGION 1..107: note = Description of Artificial Sequence: Synthetic polypeptide
DIVMTQSPSSVSASVGDRVTITCRASQGINSWLAWYQQKPGNAPKLLIYAASSLQSGVPSRFSGIGSGTDFIFTISSLQPEDFASYYCQQANSFPWTFGQGTKVEIK

SEQ ID NO: 917 - protein, 453 aa, synthetic construct
  REGION 1..453: note = Description of Artificial Sequence: Synthetic polypeptide
EVQLVESGGGLVKPGGSLRLSCAASGFTFSNYGMNWVRQAPGKGLEWVSYISSGSSYKYYADSMKGRFTISRDNAMNLLYLQMNSLRPEDSAMYYCARDPVVTEYYYYGMDVWGQGTTVTVSSASTKGPSVFPLAPSSKSTSGGTAALGCLVKDYFPEPVTVSWNSGALTSGVHTFPAVLQSSGLYSLSSVVTVPSSSLGTQTYICNVNHKPSNTKVDKKVEPKSCDKTHTCPPCPAPELLGGPSVFLFPPKPKDTLMISRTPEVTCVVVDVSHEDPEVKFNWYVDGVEVHNAKTKPREEQYNSTYRVVSVLTVLHQDWLNGKEYKCKVSNKALPAPIEKTISKAKGQPREPQVYTLPPSREEMTKNQVSLTCLVKGFYPSDIAVEWESNGQPENNYKTTPPVLDSDGSFFLYSKLTVDKSRWQQGNVFSCSVMHEALHNHYTQKSLSLSPGK

SEQ ID NO: 918 - protein, 214 aa, synthetic construct
  REGION 1..214: note = Description of Artificial Sequence: Synthetic polypeptide
DIVMTQSPSSVSASVGDRVTITCRASQGINSWLAWYQQKPGNAPKLLIYAASSLQSGVPSRFSGIGSGTDFIFTISSLQPEDFASYYCQQANSFPWTFGQGTKVEIKRTVAAPSVFIFPPSDEQLKSGTASVVCLLNNFYPREAKVQWKVDNALQSGNSQESVTEQDSKDSTYSLSSTLTLSKADYEKHKVYACEVTHQGLSSPVTKSFNRGEC

SEQ ID NO: 919 - protein, 5 aa, synthetic construct
  REGION 1..5: note = Description of Artificial Sequence: Synthetic peptide
SSYWT

SEQ ID NO: 920 - protein, 16 aa, synthetic construct
  REGION 1..16: note = Description of Artificial Sequence: Synthetic peptide
YMFYLGSTNYNPSLKS

SEQ ID NO: 921 - protein, 10 aa, synthetic construct
  REGION 1..10: note = Description of Artificial Sequence: Synthetic peptide
ERPVLDAFDI

SEQ ID NO: 922 - protein, 11 aa, synthetic construct
  REGION 1..11: note = Description of Artificial Sequence: Synthetic peptide
RASQDITNYLA

SEQ ID NO: 923 - protein, 7 aa, synthetic construct
  REGION 1..7: note = Description of Artificial Sequence: Synthetic peptide
AASSLQG

SEQ ID NO: 924 - protein, 9 aa, synthetic construct
  REGION 1..9: note = Description of Artificial Sequence: Synthetic peptide
LQHDTYPYT

SEQ ID NO: 925 - protein, 7 aa, synthetic construct
  REGION 1..7: note = Description of Artificial Sequence: Synthetic peptide
GGSIKSS

SEQ ID NO: 926 - protein, 5 aa, synthetic construct
  REGION 1..5: note = Description of Artificial Sequence: Synthetic peptide
FYLGS

SEQ ID NO: 927 - protein, 9 aa, synthetic construct
  REGION 1..9: note = Description of Artificial Sequence: Synthetic peptide
ERPVLDAFD

SEQ ID NO: 928 - protein, 7 aa, synthetic construct
  REGION 1..7: note = Description of Artificial Sequence: Synthetic peptide
SQDITNY

SEQ ID NO: 929 - skipped

SEQ ID NO: 930 - protein, 6 aa, synthetic construct
  REGION 1..6: note = Description of Artificial Sequence: Synthetic peptide
HDTYPY

SEQ ID NO: 931 - protein, 10 aa, synthetic construct
  REGION 1..10: note = Description of Artificial Sequence: Synthetic peptide
GGSIKSSYWT

SEQ ID NO: 932 - protein, 9 aa, synthetic construct
  REGION 1..9: note = Description of Artificial Sequence: Synthetic peptide
YMFYLGSTN

SEQ ID NO: 933 - protein, 10 aa, synthetic construct
  REGION 1..10: note = Description of Artificial Sequence: Synthetic peptide
ERPVLDAFDI

SEQ ID NO: 934 - protein, 11 aa, synthetic construct
  REGION 1..11: note = Description of Artificial Sequence: Synthetic peptide
RASQDITNYLA

SEQ ID NO: 935 - protein, 7 aa, synthetic construct
  REGION 1..7: note = Description of Artificial Sequence: Synthetic peptide
AASSLQG

SEQ ID NO: 936 - protein, 9 aa, synthetic construct
  REGION 1..9: note = Description of Artificial Sequence: Synthetic peptide
LQHDTYPYT

SEQ ID NO: 937 - protein, 6 aa, synthetic construct
  REGION 1..6: note = Description of Artificial Sequence: Synthetic peptide
KSSYWT

SEQ ID NO: 938 - protein, 12 aa, synthetic construct
  REGION 1..12: note = Description of Artificial Sequence: Synthetic peptide
WIGYMFYLGSTN

SEQ ID NO: 939 - protein, 11 aa, synthetic construct
  REGION 1..11: note = Description of Artificial Sequence: Synthetic peptide
SRERPVLDAFD

SEQ ID NO: 940 - protein, 7 aa, synthetic construct
  REGION 1..7: note = Description of Artificial Sequence: Synthetic peptide
TNYLAWF

SEQ ID NO: 941 - protein, 10 aa, synthetic construct
  REGION 1..10: note = Description of Artificial Sequence: Synthetic peptide
RLIYAASSLQ

SEQ ID NO: 942 - protein, 8 aa, synthetic construct
  REGION 1..8: note = Description of Artificial Sequence: Synthetic peptide
LQHDTYPY

SEQ ID NO: 943 - protein, 8 aa, synthetic construct
  REGION 1..8: note = Description of Artificial Sequence: Synthetic peptide
GGSIKSSY

SEQ ID NO: 944 - protein, 7 aa, synthetic construct
  REGION 1..7: note = Description of Artificial Sequence: Synthetic peptide
MFYLGST

SEQ ID NO: 945 - protein, 12 aa, synthetic construct
  REGION 1..12: note = Description of Artificial Sequence: Synthetic peptide
SRERPVLDAFDI

SEQ ID NO: 946 - protein, 6 aa, synthetic construct
  REGION 1..6: note = Description of Artificial Sequence: Synthetic peptide
QDITNY

SEQ ID NO: 947 - skipped

SEQ ID NO: 948 - protein, 9 aa, synthetic construct
  REGION 1..9: note = Description of Artificial Sequence: Synthetic peptide
LQHDTYPYT

SEQ ID NO: 949 - protein, 118 aa, synthetic construct
  REGION 1..118: note = Description of Artificial Sequence: Synthetic polypeptide
QVQLQESGPGLVKPSETLSLTCTVSGGSIKSSYWTWIRQPPGKGLEWIGYMFYLGSTNYNPSLKSRVTMSIDTSRNQFSLKLSSVTAADTAVYYCSRERPVLDAFDIWGQGTMVTVSS

SEQ ID NO: 950 - protein, 107 aa, synthetic construct
  REGION 1..107: note = Description of Artificial Sequence: Synthetic polypeptide
DIQMTQSPSAMSASVGDRVTITCRASQDITNYLAWFQQKPGKVPKRLIYAASSLQGGVPSRFSGSGSGTEFTLTISSLQPEDFSTYYCLQHDTYPYTFGQGTKVDIK

SEQ ID NO: 951 - protein, 448 aa, synthetic construct
  REGION 1..448: note = Description of Artificial Sequence: Synthetic polypeptide
QVQLQESGPGLVKPSETLSLTCTVSGGSIKSSYWTWIRQPPGKGLEWIGYMFYLGSTNYNPSLKSRVTMSIDTSRNQFSLKLSSVTAADTAVYYCSRERPVLDAFDIWGQGTMVTVSSASTKGPSVFPLAPSSKSTSGGTAALGCLVKDYFPEPVTVSWNSGALTSGVHTFPAVLQSSGLYSLSSVVTVPSSSLGTQTYICNVNHKPSNTKVDKKVEPKSCDKTHTCPPCPAPELLGGPSVFLFPPKPKDTLMISRTPEVTCVVVDVSHEDPEVKFNWYVDGVEVHNAKTKPREEQYNSTYRVVSVLTVLHQDWLNGKEYKCKVSNKALPAPIEKTISKAKGQPREPQVYTLPPSREEMTKNQVSLTCLVKGFYPSDIAVEWESNGQPENNYKTTPPVLDSDGSFFLYSKLTVDKSRWQQGNVFSCSVMHEALHNHYTQKSLSLSPGK

SEQ ID NO: 952 - protein, 214 aa, synthetic construct
  REGION 1..214: note = Description of Artificial Sequence: Synthetic polypeptide
DIQMTQSPSAMSASVGDRVTITCRASQDITNYLAWFQQKPGKVPKRLIYAASSLQGGVPSRFSGSGSGTEFTLTISSLQPEDFSTYYCLQHDTYPYTFGQGTKVDIKRTVAAPSVFIFPPSDEQLKSGTASVVCLLNNFYPREAKVQWKVDNALQSGNSQESVTEQDSKDSTYSLSSTLTLSKADYEKHKVYACEVTHQGLSSPVTKSFNRGEC

SEQ ID NO: 953 - protein, 5 aa, synthetic construct
  REGION 1..5: note = Description of Artificial Sequence: Synthetic peptide
NYDMN

SEQ ID NO: 954 - protein, 17 aa, synthetic construct
  REGION 1..17: note = Description of Artificial Sequence: Synthetic peptide
SISSSSSYIYYADSVKG

SEQ ID NO: 955 - protein, 15 aa, synthetic construct
  REGION 1..15: note = Description of Artificial Sequence: Synthetic peptide
DVGVTTDYYYYGMDV

SEQ ID NO: 956 - protein, 12 aa, synthetic construct
  REGION 1..12: note = Description of Artificial Sequence: Synthetic peptide
RASQSVASSYLA

SEQ ID NO: 957 - protein, 7 aa, synthetic construct
  REGION 1..7: note = Description of Artificial Sequence: Synthetic peptide
GASSRAT

SEQ ID NO: 958 - protein, 10 aa, synthetic construct
  REGION 1..10: note = Description of Artificial Sequence: Synthetic peptide
QQYGSSPPYT

SEQ ID NO: 959 - protein, 7 aa, synthetic construct
  REGION 1..7: note = Description of Artificial Sequence: Synthetic peptide
GFTFSNY

SEQ ID NO: 960 - protein, 6 aa, synthetic construct
  REGION 1..6: note = Description of Artificial Sequence: Synthetic peptide
SSSSSY

SEQ ID NO: 961 - protein, 14 aa, synthetic construct
  REGION 1..14: note = Description of Artificial Sequence: Synthetic peptide
DVGVTTDYYYYGMD

SEQ ID NO: 962 - protein, 8 aa, synthetic construct
  REGION 1..8: note = Description of Artificial Sequence: Synthetic peptide
SQSVASSY

SEQ ID NO: 963 - skipped

SEQ ID NO: 964 - protein, 7 aa, synthetic construct
  REGION 1..7: note = Description of Artificial Sequence: Synthetic peptide
YGSSPPY

SEQ ID NO: 965 - protein, 10 aa, synthetic construct
  REGION 1..10: note = Description of Artificial Sequence: Synthetic peptide
GFTFSNYDMN

SEQ ID NO: 966 - protein, 10 aa, synthetic construct
  REGION 1..10: note = Description of Artificial Sequence: Synthetic peptide
SISSSSSYIY

SEQ ID NO: 967 - protein, 15 aa, synthetic construct
  REGION 1..15: note = Description of Artificial Sequence: Synthetic peptide
DVGVTTDYYYYGMDV

SEQ ID NO: 968 - protein, 12 aa, synthetic construct
  REGION 1..12: note = Description of Artificial Sequence: Synthetic peptide
RASQSVASSYLA

SEQ ID NO: 969 - protein, 7 aa, synthetic construct
  REGION 1..7: note = Description of Artificial Sequence: Synthetic peptide
GASSRAT

SEQ ID NO: 970 - protein, 10 aa, synthetic construct
  REGION 1..10: note = Description of Artificial Sequence: Synthetic peptide
QQYGSSPPYT

SEQ ID NO: 971 - protein, 6 aa, synthetic construct
  REGION 1..6: note = Description of Artificial Sequence: Synthetic peptide
SNYDMN

SEQ ID NO: 972 - protein, 13 aa, synthetic construct
  REGION 1..13: note = Description of Artificial Sequence: Synthetic peptide
WVSSISSSSSYIY

SEQ ID NO: 973 - protein, 16 aa, synthetic construct
  REGION 1..16: note = Description of Artificial Sequence: Synthetic peptide
ARDVGVTTDYYYYGMD

SEQ ID NO: 974 - protein, 8 aa, synthetic construct
  REGION 1..8: note = Description of Artificial Sequence: Synthetic peptide
ASSYLAWY

SEQ ID NO: 975 - protein, 10 aa, synthetic construct
  REGION 1..10: note = Description of Artificial Sequence: Synthetic peptide
LLIYGASSRA

SEQ ID NO: 976 - protein, 9 aa, synthetic construct
  REGION 1..9: note = Description of Artificial Sequence: Synthetic peptide
QQYGSSPPY

SEQ ID NO: 977 - protein, 8 aa, synthetic construct
  REGION 1..8: note = Description of Artificial Sequence: Synthetic peptide
GFTFSNYD

SEQ ID NO: 978 - protein, 8 aa, synthetic construct
  REGION 1..8: note = Description of Artificial Sequence: Synthetic peptide
ISSSSSYI

SEQ ID NO: 979 - protein, 17 aa, synthetic construct
  REGION 1..17: note = Description of Artificial Sequence: Synthetic peptide
ARDVGVTTDYYYYGMDV

SEQ ID NO: 980 - protein, 7 aa, synthetic construct
  REGION 1..7: note = Description of Artificial Sequence: Synthetic peptide
QSVASSY

SEQ ID NO: 981 - skipped

SEQ ID NO: 982 - protein, 10 aa, synthetic construct
  REGION 1..10: note = Description of Artificial Sequence: Synthetic peptide
QQYGSSPPYT

SEQ ID NO: 983 - protein, 124 aa, synthetic construct; identical to SEQ ID NO: 371
  REGION 1..124: note = Description of Artificial Sequence: Synthetic polypeptide

SEQ ID NO: 984 - protein, 109 aa, synthetic construct
  REGION 1..109: note = Description of Artificial Sequence: Synthetic polypeptide
EIVLTQSPGTLSLSPGDRATLSCRASQSVASSYLAWYQQKPGQSPRLLIYGASSRATGIPDRFSGSGSGTDFTLTISRLEPEDFAVYYCQQYGSSPPYTFGQGTKVEIK

SEQ ID NO: 985 - protein, 454 aa, synthetic construct; identical to SEQ ID NO: 373
  REGION 1..454: note = Description of Artificial Sequence: Synthetic polypeptide

SEQ ID NO: 986 - protein, 216 aa, synthetic construct
  REGION 1..216: note = Description of Artificial Sequence: Synthetic polypeptide
EIVLTQSPGTLSLSPGDRATLSCRASQSVASSYLAWYQQKPGQSPRLLIYGASSRATGIPDRFSGSGSGTDFTLTISRLEPEDFAVYYCQQYGSSPPYTFGQGTKVEIKRTVAAPSVFIFPPSDEQLKSGTASVVCLLNNFYPREAKVQWKVDNALQSGNSQESVTEQDSKDSTYSLSSTLTLSKADYEKHKVYACEVTHQGLSSPVTKSFNRGEC

SEQ ID NO: 987 - protein, 5 aa, synthetic construct
  REGION 1..5: note = Description of Artificial Sequence: Synthetic peptide
NYDMN

SEQ ID NO: 988 - protein, 17 aa, synthetic construct
  REGION 1..17: note = Description of Artificial Sequence: Synthetic peptide
SISSSSSYIYYADSVKG

SEQ ID NO: 989 - protein, 15 aa, synthetic construct
  REGION 1..15: note = Description of Artificial Sequence: Synthetic peptide
DVGVTTDYYYYGMDV

SEQ ID NO: 990 - protein, 12 aa, synthetic construct
  REGION 1..12: note = Description of Artificial Sequence: Synthetic peptide
RASQSVASSYLA

SEQ ID NO: 991 - protein, 7 aa, synthetic construct
  REGION 1..7: note = Description of Artificial Sequence: Synthetic peptide
GASSRAT

SEQ ID NO: 992 - protein, 10 aa, synthetic construct
  REGION 1..10: note = Description of Artificial Sequence: Synthetic peptide
QQYGSSPPYT

SEQ ID NO: 993 - protein, 7 aa, synthetic construct
  REGION 1..7: note = Description of Artificial Sequence: Synthetic peptide
GFTFSNY

SEQ ID NO: 994 - protein, 6 aa, synthetic construct
  REGION 1..6: note = Description of Artificial Sequence: Synthetic peptide
SSSSSY

SEQ ID NO: 995 - protein, 14 aa, synthetic construct
  REGION 1..14: note = Description of Artificial Sequence: Synthetic peptide
DVGVTTDYYYYGMD

SEQ ID NO: 996 - protein, 8 aa, synthetic construct
  REGION 1..8: note = Description of Artificial Sequence: Synthetic peptide
SQSVASSY

SEQ ID NO: 997 - skipped

SEQ ID NO: 998 - protein, 7 aa, synthetic construct
  REGION 1..7: note = Description of Artificial Sequence: Synthetic peptide
YGSSPPY

SEQ ID NO: 999 - protein, 10 aa, synthetic construct
  REGION 1..10: note = Description of Artificial Sequence: Synthetic peptide
GFTFSNYDMN

SEQ ID NO: 1000 - protein, 10 aa, synthetic construct
  REGION 1..10: note = Description of Artificial Sequence: Synthetic peptide
SISSSSSYIY

SEQ ID NO: 1001 - protein, 15 aa, synthetic construct
  REGION 1..15: note = Description of Artificial Sequence: Synthetic peptide
DVGVTTDYYYYGMDV

SEQ ID NO: 1002 - protein, 12 aa, synthetic construct
  REGION 1..12: note = Description of Artificial Sequence: Synthetic peptide
RASQSVASSYLA

SEQ ID NO: 1003 - protein, 7 aa, synthetic construct
  REGION 1..7: note = Description of Artificial Sequence: Synthetic peptide
GASSRAT

SEQ ID NO: 1004 - protein, 10 aa, synthetic construct
  REGION 1..10: note = Description of Artificial Sequence: Synthetic peptide
QQYGSSPPYT

SEQ ID NO: 1005 - protein, 6 aa, synthetic construct
  REGION 1..6: note = Description of Artificial Sequence: Synthetic peptide
SNYDMN

SEQ ID NO: 1006 - protein, 13 aa, synthetic construct
  REGION 1..13: note = Description of Artificial Sequence: Synthetic peptide
WVSSISSSSSYIY

SEQ ID NO: 1007 - protein, 16 aa, synthetic construct
  REGION 1..16: note = Description of Artificial Sequence: Synthetic peptide
ARDVGVTTDYYYYGMD

SEQ ID NO: 1008 - protein, 8 aa, synthetic construct
  REGION 1..8: note = Description of Artificial Sequence: Synthetic peptide
ASSYLAWY

SEQ ID NO: 1009 - protein, 10 aa, synthetic construct
  REGION 1..10: note = Description of Artificial Sequence: Synthetic peptide
LLIYGASSRA

SEQ ID NO: 1010 - protein, 9 aa, synthetic construct
  REGION 1..9: note = Description of Artificial Sequence: Synthetic peptide
QQYGSSPPY

SEQ ID NO: 1011 - protein, 8 aa, synthetic construct
  REGION 1..8: note = Description of Artificial Sequence: Synthetic peptide
GFTFSNYD

SEQ ID NO: 1012 - protein, 8 aa, synthetic construct
  REGION 1..8: note = Description of Artificial Sequence: Synthetic peptide
ISSSSSYI

SEQ ID NO: 1013 - protein, 17 aa, synthetic construct
  REGION 1..17: note = Description of Artificial Sequence: Synthetic peptide
ARDVGVTTDYYYYGMDV

SEQ ID NO: 1014 - protein, 7 aa, synthetic construct
  REGION 1..7: note = Description of Artificial Sequence: Synthetic peptide
QSVASSY

SEQ ID NO: 1015 - skipped

SEQ ID NO: 1016 - protein, 10 aa, synthetic construct
  REGION 1..10: note = Description of Artificial Sequence: Synthetic peptide
QQYGSSPPYT

SEQ ID NO: 1017 - protein, 124 aa, synthetic construct
  REGION 1..124: note = Description of Artificial Sequence: Synthetic polypeptide
EVQLLESGGGLVKPGGSLRLSCSASGFTFSNYDMNWVRQAPGKGLEWVSSISSSSSYIYYADSVKGRFTISRDNAKNSLYLQMNSLRAEDTAVYHCARDVGVTTDYYYYGMDVWGQGTMVTVSS

SEQ ID NO: 1018 - protein, 109 aa, synthetic construct; identical to SEQ ID NO: 304
  REGION 1..109: note = Description of Artificial Sequence: Synthetic polypeptide

SEQ ID NO: 1019 - protein, 454 aa, synthetic construct
  REGION 1..454: note = Description of Artificial Sequence: Synthetic polypeptide
EVQLLESGGGLVKPGGSLRLSCSASGFTFSNYDMNWVRQAPGKGLEWVSSISSSSSYIYYADSVKGRFTISRDNAKNSLYLQMNSLRAEDTAVYHCARDVGVTTDYYYYGMDVWGQGTMVTVSSASTKGPSVFPLAPSSKSTSGGTAALGCLVKDYFPEPVTVSWNSGALTSGVHTFPAVLQSSGLYSLSSVVTVPSSSLGTQTYICNVNHKPSNTKVDKKVEPKSCDKTHTCPPCPAPELLGGPSVFLFPPKPKDTLMISRTPEVTCVVVDVSHEDPEVKFNWYVDGVEVHNAKTKPREEQYNSTYRVVSVLTVLHQDWLNGKEYKCKVSNKALPAPIEKTISKAKGQPREPQVYTLPPSREEMTKNQVSLTCLVKGFYPSDIAVEWESNGQPENNYKTTPPVLDSDGSFFLYSKLTVDKSRWQQGNVFSCSVMHEALHNHYTQKSLSLSPGK

SEQ ID NO: 1020 - protein, 216 aa, synthetic construct; identical to SEQ ID NO: 306
  REGION 1..216: note = Description of Artificial Sequence: Synthetic polypeptide

SEQ ID NO: 1021 - protein, 5 aa, synthetic construct
  REGION 1..5: note = Description of Artificial Sequence: Synthetic peptide
TYGMN

SEQ ID NO: 1022 - protein, 17 aa, synthetic construct
  REGION 1..17: note = Description of Artificial Sequence: Synthetic peptide
YISTSSYTIYYSDSVKG

SEQ ID NO: 1023 - protein, 9 aa, synthetic construct
  REGION 1..9: note = Description of Artificial Sequence: Synthetic peptide
EGDWWYFDL

SEQ ID NO: 1024 - protein, 14 aa, synthetic construct
  REGION 1..14: note = Description of Artificial Sequence: Synthetic peptide
TGTSSDVGGYNYVS

SEQ ID NO: 1025 - protein, 7 aa, synthetic construct
  REGION 1..7: note = Description of Artificial Sequence: Synthetic peptide
EVSNRPS

SEQ ID NO: 1026 - protein, 10 aa, synthetic construct
  REGION 1..10: note = Description of Artificial Sequence: Synthetic peptide
SSYTSSSTLV

SEQ ID NO: 1027 - protein, 7 aa, synthetic construct
  REGION 1..7: note = Description of Artificial Sequence: Synthetic peptide
GFTFSTY

SEQ ID NO: 1028 - protein, 6 aa, synthetic construct
  REGION 1..6: note = Description of Artificial Sequence: Synthetic peptide
STSSYT

SEQ ID NO: 1029 - protein, 8 aa, synthetic construct
  REGION 1..8: note = Description of Artificial Sequence: Synthetic peptide
EGDWWYFD

SEQ ID NO: 1030 - protein, 10 aa, synthetic construct
  REGION 1..10: note = Description of Artificial Sequence: Synthetic peptide
TSSDVGGYNY

SEQ ID NO: 1031 - skipped

SEQ ID NO: 1032 - protein, 7 aa, synthetic construct
  REGION 1..7: note = Description of Artificial Sequence: Synthetic peptide
YTSSSTL

SEQ ID NO: 1033 - protein, 10 aa, synthetic construct
  REGION 1..10: note = Description of Artificial Sequence: Synthetic peptide
GFTFSTYGMN

SEQ ID NO: 1034 - protein, 10 aa, synthetic construct
  REGION 1..10: note = Description of Artificial Sequence: Synthetic peptide
YISTSSYTIY

SEQ ID NO: 1035 - protein, 9 aa, synthetic construct
  REGION 1..9: note = Description of Artificial Sequence: Synthetic peptide
EGDWWYFDL

SEQ ID NO: 1036 - protein, 14 aa, synthetic construct
  REGION 1..14: note = Description of Artificial Sequence: Synthetic peptide
TGTSSDVGGYNYVS

SEQ ID NO: 1037 - protein, 7 aa, synthetic construct
  REGION 1..7: note = Description of Artificial Sequence: Synthetic peptide
EVSNRPS

SEQ ID NO: 1038 - protein, 10 aa, synthetic construct
  REGION 1..10: note = Description of Artificial Sequence: Synthetic peptide
SSYTSSSTLV

SEQ ID NO: 1039 - protein, 6 aa, synthetic construct
  REGION 1..6: note = Description of Artificial Sequence: Synthetic peptide
STYGMN

SEQ ID NO: 1040 - protein, 13 aa, synthetic construct
  REGION 1..13: note = Description of Artificial Sequence: Synthetic peptide
WISYISTSSYTIY

SEQ ID NO: 1041 - protein, 10 aa, synthetic construct
  REGION 1..10: note = Description of Artificial Sequence: Synthetic peptide
AREGDWWYFD

SEQ ID NO: 1042 - protein, 10 aa, synthetic construct
  REGION 1..10: note = Description of Artificial Sequence: Synthetic peptide
VGGYNYVSWY

SEQ ID NO: 1043 - protein, 10 aa, synthetic construct
  REGION 1..10: note = Description of Artificial Sequence: Synthetic peptide
LMIYEVSNRP

SEQ ID NO: 1044 - protein, 9 aa, synthetic construct
  REGION 1..9: note = Description of Artificial Sequence: Synthetic peptide
SSYTSSSTL

SEQ ID NO: 1045 - protein, 8 aa, synthetic construct
  REGION 1..8: note = Description of Artificial Sequence: Synthetic peptide
GFTFSTYG

SEQ ID NO: 1046 - protein, 8 aa, synthetic construct
  REGION 1..8: note = Description of Artificial Sequence: Synthetic peptide
ISTSSYTI

SEQ ID NO: 1047 - protein, 11 aa, synthetic construct
  REGION 1..11: note = Description of Artificial Sequence: Synthetic peptide
AREGDWWYFDL

SEQ ID NO: 1048 - protein, 9 aa, synthetic construct
  REGION 1..9: note = Description of Artificial Sequence: Synthetic peptide
SSDVGGYNY

SEQ ID NO: 1049 - skipped

SEQ ID NO: 1050 - protein, 10 aa, synthetic construct
  REGION 1..10: note = Description of Artificial Sequence: Synthetic peptide
SSYTSSSTLV

SEQ ID NO: 1051 - protein, 118 aa, synthetic construct
  REGION 1..118: note = Description of Artificial Sequence: Synthetic polypeptide
EVQLVESGGGLVQPGGSLRLSCAASGFTFSTYGMNWVRQAPGKGLEWISYISTSSYTIYYSDSVKGRFTVSRDNAKNSLYLQMNSLRDEDTAVYYCAREGDWWYFDLWGRGTTVTVSS

SEQ ID NO: 1052 - protein, 110 aa, synthetic construct
  REGION 1..110: note = Description of Artificial Sequence: Synthetic polypeptide
QSALTQPASVSGSPGQSITISCTGTSSDVGGYNYVSWYQQHPGKAPKLMIYEVSNRPSGVSYRFSGSKSGNTASLTISGLQAEDEADYYCSSYTSSSTLVFGGGTKLTVL

SEQ ID NO: 1053 - protein, 448 aa, synthetic construct
  REGION 1..448: note = Description of Artificial Sequence: Synthetic polypeptide
EVQLVESGGGLVQPGGSLRLSCAASGFTFSTYGMNWVRQAPGKGLEWISYISTSSYTIYYSDSVKGRFTVSRDNAKNSLYLQMNSLRDEDTAVYYCAREGDWWYFDLWGRGTTVTVSSASTKGPSVFPLAPSSKSTSGGTAALGCLVKDYFPEPVTVSWNSGALTSGVHTFPAVLQSSGLYSLSSVVTVPSSSLGTQTYICNVNHKPSNTKVDKKVEPKSCDKTHTCPPCPAPELLGGPSVFLFPPKPKDTLMISRTPEVTCVVVDVSHEDPEVKFNWYVDGVEVHNAKTKPREEQYNSTYRVVSVLTVLHQDWLNGKEYKCKVSNKALPAPIEKTISKAKGQPREPQVYTLPPSREEMTKNQVSLTCLVKGFYPSDIAVEWESNGQPENNYKTTPPVLDSDGSFFLYSKLTVDKSRWQQGNVFSCSVMHEALHNHYTQKSLSLSPGK

SEQ ID NO: 1054 - protein, 216 aa, synthetic construct
  REGION 1..216: note = Description of Artificial Sequence: Synthetic polypeptide
QSALTQPASVSGSPGQSITISCTGTSSDVGGYNYVSWYQQHPGKAPKLMIYEVSNRPSGVSYRFSGSKSGNTASLTISGLQAEDEADYYCSSYTSSSTLVFGGGTKLTVLGQPKAAPSVTLFPPSSEELQANKATLVCLISDFYPGAVTVAWKADSSPVKAGVETTTPSKQSNNKYAASSYLSLTPEQWKSHRSYSCQVTHEGSTVEKTVAPTECS

SEQ ID NO: 1055 - protein, 5 aa, synthetic construct
  REGION 1..5: note = Description of Artificial Sequence: Synthetic peptide
NYDMN

SEQ ID NO: 1056 - protein, 17 aa, synthetic construct
  REGION 1..17: note = Description of Artificial Sequence: Synthetic peptide
SISSSSSYIYYADSVKG

SEQ ID NO: 1057 - protein, 15 aa, synthetic construct
  REGION 1..15: note = Description of Artificial Sequence: Synthetic peptide
DVGVTTDYYYYGMDV

SEQ ID NO: 1058 - protein, 12 aa, synthetic construct
  REGION 1..12: note = Description of Artificial Sequence: Synthetic peptide
RASQSVASSYLA

SEQ ID NO: 1059 - protein, 7 aa, synthetic construct
  REGION 1..7: note = Description of Artificial Sequence: Synthetic peptide
GASSRAT

SEQ ID NO: 1060 - protein, 10 aa, synthetic construct
  REGION 1..10: note = Description of Artificial Sequence: Synthetic peptide
QQYGSSPPYT

SEQ ID NO: 1061 - protein, 7 aa, synthetic construct
  REGION 1..7: note = Description of Artificial Sequence: Synthetic peptide
GFTFSNY

SEQ ID NO: 1062 - protein, 6 aa, synthetic construct
  REGION 1..6: note = Description of Artificial Sequence: Synthetic peptide
SSSSSY

SEQ ID NO: 1063 - protein, 14 aa, synthetic construct
  REGION 1..14: note = Description of Artificial Sequence: Synthetic peptide
DVGVTTDYYYYGMD

SEQ ID NO: 1064 - protein, 8 aa, synthetic construct
  REGION 1..8: note = Description of Artificial Sequence: Synthetic peptide
SQSVASSY

SEQ ID NO: 1065 - skipped

SEQ ID NO: 1066 - protein, 7 aa, synthetic construct
  REGION 1..7: note = Description of Artificial Sequence: Synthetic peptide
YGSSPPY

SEQ ID NO: 1067 - protein, 10 aa, synthetic construct
  REGION 1..10: note = Description of Artificial Sequence: Synthetic peptide
GFTFSNYDMN

SEQ ID NO: 1068 - protein, 10 aa, synthetic construct
  REGION 1..10: note = Description of Artificial Sequence: Synthetic peptide
SISSSSSYIY

SEQ ID NO: 1069 - protein, 15 aa, synthetic construct
  REGION 1..15: note = Description of Artificial Sequence: Synthetic peptide
DVGVTTDYYYYGMDV

SEQ ID NO: 1070 - protein, 12 aa, synthetic construct
  REGION 1..12: note = Description of Artificial Sequence: Synthetic peptide
RASQSVASSYLA

SEQ ID NO: 1071 - protein, 7 aa, synthetic construct
  REGION 1..7: note = Description of Artificial Sequence: Synthetic peptide
GASSRAT

SEQ ID NO: 1072 - protein, 10 aa, synthetic construct
  REGION 1..10: note = Description of Artificial Sequence: Synthetic peptide
QQYGSSPPYT

SEQ ID NO: 1073 - protein, 6 aa, synthetic construct
  REGION 1..6: note = Description of Artificial Sequence: Synthetic peptide
SNYDMN

SEQ ID NO: 1074 - protein, 13 aa, synthetic construct
  REGION 1..13: note = Description of Artificial Sequence: Synthetic peptide
WVSSISSSSSYIY

SEQ ID NO: 1075 - protein, 16 aa, synthetic construct
  REGION 1..16: note = Description of Artificial Sequence: Synthetic peptide
ARDVGVTTDYYYYGMD

SEQ ID NO: 1076 - protein, 8 aa, synthetic construct
  REGION 1..8: note = Description of Artificial Sequence: Synthetic peptide
ASSYLAWY

SEQ ID NO: 1077 - protein, 10 aa, synthetic construct
  REGION 1..10: note = Description of Artificial Sequence: Synthetic peptide
LLIYGASSRA

SEQ ID NO: 1078 - protein, 9 aa, synthetic construct
  REGION 1..9: note = Description of Artificial Sequence: Synthetic peptide
QQYGSSPPY

SEQ ID NO: 1079 - protein, 8 aa, synthetic construct
  REGION 1..8: note = Description of Artificial Sequence: Synthetic peptide
GFTFSNYD

SEQ ID NO: 1080 - protein, 8 aa, synthetic construct
  REGION 1..8: note = Description of Artificial Sequence: Synthetic peptide
ISSSSSYI

SEQ ID NO: 1081 - protein, 17 aa, synthetic construct
  REGION 1..17: note = Description of Artificial Sequence: Synthetic peptide
ARDVGVTTDYYYYGMDV

SEQ ID NO: 1082 - protein, 7 aa, synthetic construct
  REGION 1..7: note = Description of Artificial Sequence: Synthetic peptide
QSVASSY

SEQ ID NO: 1083 - skipped

SEQ ID NO: 1084 - protein, 10 aa, synthetic construct
  REGION 1..10: note = Description of Artificial Sequence: Synthetic peptide
QQYGSSPPYT

SEQ ID NO: 1085 - protein, 124 aa, synthetic construct; identical to SEQ ID NO: 303
  REGION 1..124: note = Description of Artificial Sequence: Synthetic polypeptide

SEQ ID NO: 1086 - protein, 109 aa, synthetic construct; identical to SEQ ID NO: 372
  REGION 1..109: note = Description of Artificial Sequence: Synthetic polypeptide

SEQ ID NO: 1087 - protein, 454 aa, synthetic construct; identical to SEQ ID NO: 305
  REGION 1..454: note = Description of Artificial Sequence: Synthetic polypeptide

SEQ ID NO: 1088 - protein, 216 aa, synthetic construct; identical to SEQ ID NO: 374
  REGION 1..216: note = Description of Artificial Sequence: Synthetic polypeptide

SEQ ID NO: 1089 - protein, 5 aa, synthetic construct
  REGION 1..5: note = Description of Artificial Sequence: Synthetic peptide
HYDMN

SEQ ID NO: 1090 - protein, 17 aa, synthetic construct
  REGION 1..17: note = Description of Artificial Sequence: Synthetic peptide
SISSSSSYIFYADSVKG

SEQ ID NO: 1091 - protein, 17 aa, synthetic construct
  REGION 1..17: note = Description of Artificial Sequence: Synthetic peptide
DRGVGDTSDYYSFGLDV

SEQ ID NO: 1092 - protein, 11 aa, synthetic construct
  REGION 1..11: note = Description of Artificial Sequence: Synthetic peptide
RASQGIATYLA

SEQ ID NO: 1093 - protein, 7 aa, synthetic construct
  REGION 1..7: note = Description of Artificial Sequence: Synthetic peptide
AASTLQS

SEQ ID NO: 1094 - protein, 10 aa, synthetic construct
  REGION 1..10: note = Description of Artificial Sequence: Synthetic peptide
QKYNSAPPWT

SEQ ID NO: 1095 - protein, 7 aa, synthetic construct
  REGION 1..7: note = Description of Artificial Sequence: Synthetic peptide
GFTFSHY

SEQ ID NO: 1096 - protein, 6 aa, synthetic construct
  REGION 1..6: note = Description of Artificial Sequence: Synthetic peptide
SSSSSY

SEQ ID NO: 1097 - protein, 16 aa, synthetic construct
  REGION 1..16: note = Description of Artificial Sequence: Synthetic peptide
DRGVGDTSDYYSFGLD

SEQ ID NO: 1098 - protein, 7 aa, synthetic construct
  REGION 1..7: note = Description of Artificial Sequence: Synthetic peptide
SQGIATY

SEQ ID NO: 1099 - skipped

SEQ ID NO: 1100 - protein, 7 aa, synthetic construct
  REGION 1..7: note = Description of Artificial Sequence: Synthetic peptide
YNSAPPW

SEQ ID NO: 1101 - protein, 10 aa, synthetic construct
  REGION 1..10: note = Description of Artificial Sequence: Synthetic peptide
GFTFSHYDMN

SEQ ID NO: 1102 - protein, 10 aa, synthetic construct
  REGION 1..10: note = Description of Artificial Sequence: Synthetic peptide
SISSSSSYIF

SEQ ID NO: 1103 - protein, 17 aa, synthetic construct
  REGION 1..17: note = Description of Artificial Sequence: Synthetic peptide
DRGVGDTSDYYSFGLDV

SEQ ID NO: 1104 - protein, 11 aa, synthetic construct
  REGION 1..11: note = Description of Artificial Sequence: Synthetic peptide
RASQGIATYLA

SEQ ID NO: 1105 - protein, 7 aa, synthetic construct
  REGION 1..7: note = Description of Artificial Sequence: Synthetic peptide
AASTLQS

SEQ ID NO: 1106 - protein, 10 aa, synthetic construct
  REGION 1..10: note = Description of Artificial Sequence: Synthetic peptide
QKYNSAPPWT

SEQ ID NO: 1107 - protein, 6 aa, synthetic construct
  REGION 1..6: note = Description of Artificial Sequence: Synthetic peptide
SHYDMN

SEQ ID NO: 1108 - protein, 13 aa, synthetic construct
  REGION 1..13: note = Description of Artificial Sequence: Synthetic peptide
WVSSISSSSSYIF

SEQ ID NO: 1109 - protein, 18 aa, synthetic construct
  REGION 1..18: note = Description of Artificial Sequence: Synthetic peptide
ARDRGVGDTSDYYSFGLD

SEQ ID NO: 1110 - protein, 7 aa, synthetic construct
  REGION 1..7: note = Description of Artificial Sequence: Synthetic peptide
ATYLAWY

SEQ ID NO: 1111 - protein, 10 aa, synthetic construct
  REGION 1..10: note = Description of Artificial Sequence: Synthetic peptide
LLIYAASTLQ

SEQ ID NO: 1112 - protein, 9 aa, synthetic construct
  REGION 1..9: note = Description of Artificial Sequence: Synthetic peptide
QKYNSAPPW

SEQ ID NO: 1113 - protein, 8 aa, synthetic construct
  REGION 1..8: note = Description of Artificial Sequence: Synthetic peptide
GFTFSHYD

SEQ ID NO: 1114 - protein, 8 aa, synthetic construct
  REGION 1..8: note = Description of Artificial Sequence: Synthetic peptide
ISSSSSYI

SEQ ID NO: 1115 - protein, 19 aa, synthetic construct
  REGION 1..19: note = Description of Artificial Sequence: Synthetic peptide
ARDRGVGDTSDYYSFGLDV

SEQ ID NO: 1116 - protein, 6 aa, synthetic construct
  REGION 1..6: note = Description of Artificial Sequence: Synthetic peptide
QGIATY

SEQ ID NO: 1117 - skipped

SEQ ID NO: 1118 - protein, 10 aa, synthetic construct
  REGION 1..10: note = Description of Artificial Sequence: Synthetic peptide
QKYNSAPPWT

SEQ ID NO: 1119 - protein, 126 aa, synthetic construct
  REGION 1..126: note = Description of Artificial Sequence: Synthetic polypeptide
QVQLVESGGGLVKPGGSLRLSCAASGFTFSHYDMNWVRQAPGKGLEWVSSISSSSSYIFYADSVKGRFTISRDNAKNSLLLQMNSLRAEDTAVYHCARDRGVGDTSDYYSFGLDVWGQGTTVTVSS

SEQ ID NO: 1120 - protein, 108 aa, synthetic construct
  REGION 1..108: note = Description of Artificial Sequence: Synthetic polypeptide
EIVLTQSPSSLSASVGDRVTITCRASQGIATYLAWYQQKPGKVPNLLIYAASTLQSGVPSRFSGSGSGTDFTLTISSLQPEDVATYYCQKYNSAPPWTFGQGTKVEIK

SEQ ID NO: 1121 - protein, 456 aa, synthetic construct
  REGION 1..456: note = Description of Artificial Sequence: Synthetic polypeptide
QVQLVESGGGLVKPGGSLRLSCAASGFTFSHYDMNWVRQAPGKGLEWVSSISSSSSYIFYADSVKGRFTISRDNAKNSLLLQMNSLRAEDTAVYHCARDRGVGDTSDYYSFGLDVWGQGTTVTVSSASTKGPSVFPLAPSSKSTSGGTAALGCLVKDYFPEPVTVSWNSGALTSGVHTFPAVLQSSGLYSLSSVVTVPSSSLGTQTYICNVNHKPSNTKVDKKVEPKSCDKTHTCPPCPAPELLGGPSVFLFPPKPKDTLMISRTPEVTCVVVDVSHEDPEVKFNWYVDGVEVHNAKTKPREEQYNSTYRVVSVLTVLHQDWLNGKEYKCKVSNKALPAPIEKTISKAKGQPREPQVYTLPPSREEMTKNQVSLTCLVKGFYPSDIAVEWESNGQPENNYKTTPPVLDSDGSFFLYSKLTVDKSRWQQGNVFSCSVMHEALHNHYTQKSLSLSPGK

SEQ ID NO: 1122 - protein, 215 aa, synthetic construct
  REGION 1..215: note = Description of Artificial Sequence: Synthetic polypeptide
EIVLTQSPSSLSASVGDRVTITCRASQGIATYLAWYQQKPGKVPNLLIYAASTLQSGVPSRFSGSGSGTDFTLTISSLQPEDVATYYCQKYNSAPPWTFGQGTKVEIKRTVAAPSVFIFPPSDEQLKSGTASVVCLLNNFYPREAKVQWKVDNALQSGNSQESVTEQDSKDSTYSLSSTLTLSKADYEKHKVYACEVTHQGLSSPVTKSFNRGEC

SEQ ID NO: 1123 - protein, 5 aa, synthetic construct
  REGION 1..5: note = Description of Artificial Sequence: Synthetic peptide
NYGMN

SEQ ID NO: 1124 - protein, 17 aa, synthetic construct
  REGION 1..17: note = Description of Artificial Sequence: Synthetic peptide
YISSGSSYKYYADSMKG

SEQ ID NO: 1125 - protein, 14 aa, synthetic construct
  REGION 1..14: note = Description of Artificial Sequence: Synthetic peptide
DPVVTEYYYYGMDV

SEQ ID NO: 1126 - protein, 11 aa, synthetic construct
  REGION 1..11: note = Description of Artificial Sequence: Synthetic peptide
RASQGINSWLA

SEQ ID NO: 1127 - protein, 7 aa, synthetic construct
  REGION 1..7: note = Description of Artificial Sequence: Synthetic peptide
AASSLQS

SEQ ID NO: 1128 - protein, 9 aa, synthetic construct
  REGION 1..9: note = Description of Artificial Sequence: Synthetic peptide
QQANSFPWT

SEQ ID NO: 1129 - protein, 7 aa, synthetic construct
  REGION 1..7: note = Description of Artificial Sequence: Synthetic peptide
GFTFSNY

SEQ ID NO: 1130 - protein, 6 aa, synthetic construct
  REGION 1..6: note = Description of Artificial Sequence: Synthetic peptide
SSGSSY

SEQ ID NO: 1131 - protein, 13 aa, synthetic construct
  REGION 1..13: note = Description of Artificial Sequence: Synthetic peptide
DPVVTEYYYYGMD

SEQ ID NO: 1132 - protein, 7 aa, synthetic construct
  REGION 1..7: note = Description of Artificial Sequence: Synthetic peptide
SQGINSW

SEQ ID NO: 1133 - skipped

SEQ ID NO: 1134 - protein, 6 aa, synthetic construct
  REGION 1..6: note = Description of Artificial Sequence: Synthetic peptide
ANSFPW

SEQ ID NO: 1135 - protein, 10 aa, synthetic construct
  REGION 1..10: note = Description of Artificial Sequence: Synthetic peptide
GFTFSNYGMN

SEQ ID NO: 1136 - protein, 10 aa, synthetic construct
  REGION 1..10: note = Description of Artificial Sequence: Synthetic peptide
YISSGSSYKY

SEQ ID NO: 1137 - protein, 14 aa, synthetic construct
  REGION 1..14: note = Description of Artificial Sequence: Synthetic peptide
DPVVTEYYYYGMDV

SEQ ID NO: 1138 - protein, 11 aa, synthetic construct
  REGION 1..11: note = Description of Artificial Sequence: Synthetic peptide
RASQGINSWLA

SEQ ID NO: 1139 - protein, 7 aa, synthetic construct
  REGION 1..7: note = Description of Artificial Sequence: Synthetic peptide
AASSLQS

SEQ ID NO: 1140 - protein, 9 aa, synthetic construct
  REGION 1..9: note = Description of Artificial Sequence: Synthetic peptide
QQANSFPWT

SEQ ID NO: 1141 - protein, 6 aa, synthetic construct
  REGION 1..6: note = Description of Artificial Sequence: Synthetic peptide
SNYGMN

SEQ ID NO: 1142 - protein, 13 aa, synthetic construct
  REGION 1..13: note = Description of Artificial Sequence: Synthetic peptide
WVSYISSGSSYKY

SEQ ID NO: 1143 - protein, 15 aa, synthetic construct
  REGION 1..15: note = Description of Artificial Sequence: Synthetic peptide
ARDPVVTEYYYYGMD

SEQ ID NO: 1144 - protein, 7 aa, synthetic construct
  REGION 1..7: note = Description of Artificial Sequence: Synthetic peptide
NSWLAWY

SEQ ID NO: 1145 - protein, 10 aa, synthetic construct
  REGION 1..10: note = Description of Artificial Sequence: Synthetic peptide
LLIYAASSLQ

SEQ ID NO: 1146 - protein, 8 aa, synthetic construct
  REGION 1..8: note = Description of Artificial Sequence: Synthetic peptide
QQANSFPW

SEQ ID NO: 1147 - protein, 8 aa, synthetic construct
  REGION 1..8: note = Description of Artificial Sequence: Synthetic peptide
GFTFSNYG

SEQ ID NO: 1148 - protein, 8 aa, synthetic construct
  REGION 1..8: note = Description of Artificial Sequence: Synthetic peptide
ISSGSSYK

SEQ ID NO: 1149 - protein, 16 aa, synthetic construct
  REGION 1..16: note = Description of Artificial Sequence: Synthetic peptide
ARDPVVTEYYYYGMDV

SEQ ID NO: 1150 - protein, 6 aa, synthetic construct
  REGION 1..6: note = Description of Artificial Sequence: Synthetic peptide
QGINSW

SEQ ID NO: 1151 - skipped

SEQ ID NO: 1152 - protein, 9 aa, synthetic construct
  REGION 1..9: note = Description of Artificial Sequence: Synthetic peptide
QQANSFPWT

SEQ ID NO: 1153 - protein, 123 aa, synthetic construct; identical to SEQ ID NO: 609
  REGION 1..123: note = Description of Artificial Sequence: Synthetic polypeptide

SEQ ID NO: 1154 - protein, 107 aa, synthetic construct; identical to SEQ ID NO: 100
  REGION 1..107: note = Description of Artificial Sequence: Synthetic polypeptide

SEQ ID NO: 1155 - protein, 453 aa, synthetic construct; identical to SEQ ID NO: 611
  REGION 1..453: note = Description of Artificial Sequence: Synthetic polypeptide

SEQ ID NO: 1156 - protein, 214 aa, synthetic construct; identical to SEQ ID NO: 102
  REGION 1..214: note = Description of Artificial Sequence: Synthetic polypeptide

SEQ ID NO: 1157 - protein, 5 aa, synthetic construct
  REGION 1..5: note = Description of Artificial Sequence: Synthetic peptide
SYTMN

SEQ ID NO: 1158 - protein, 17 aa, synthetic construct
  REGION 1..17: note = Description of Artificial Sequence: Synthetic peptide
SISTSSSYIDYADSVKG

SEQ ID NO: 1159 - protein, 14 aa, synthetic construct
  REGION 1..14: note = Description of Artificial Sequence: Synthetic peptide
DGDMVAPIKGSFDY

SEQ ID NO: 1160 - protein, 17 aa, synthetic construct
  REGION 1..17: note = Description of Artificial Sequence: Synthetic peptide
RSSQSLLNSDDGNTYLD

SEQ ID NO: 1161 - protein, 7 aa, synthetic construct
  REGION 1..7: note = Description of Artificial Sequence: Synthetic peptide
TLSYRAS

SEQ ID NO: 1162 - protein, 9 aa, synthetic construct
  REGION 1..9: note = Description of Artificial Sequence: Synthetic peptide
MQRIEFPIT

SEQ ID NO: 1163 - protein, 7 aa, synthetic construct
  REGION 1..7: note = Description of Artificial Sequence: Synthetic peptide
GFTFSSY

SEQ ID NO: 1164 - protein, 6 aa, synthetic construct
  REGION 1..6: note = Description of Artificial Sequence: Synthetic peptide
STSSSY

SEQ ID NO: 1165 - protein, 13 aa, synthetic construct
  REGION 1..13: note = Description of Artificial Sequence: Synthetic peptide
DGDMVAPIKGSFD

SEQ ID NO: 1166 - protein, 13 aa, synthetic construct
  REGION 1..13: note = Description of Artificial Sequence: Synthetic peptide
SQSLLNSDDGNTY

SEQ ID NO: 1167 - skipped

SEQ ID NO: 1168 - protein, 6 aa, synthetic construct
  REGION 1..6: note = Description of Artificial Sequence: Synthetic peptide
RIEFPI

SEQ ID NO: 1169 - protein, 10 aa, synthetic construct
  REGION 1..10: note = Description of Artificial Sequence: Synthetic peptide
GFTFSSYTMN

SEQ ID NO: 1170 - protein, 10 aa, synthetic construct
  REGION 1..10: note = Description of Artificial Sequence: Synthetic peptide
SISTSSSYID

SEQ ID NO: 1171 - protein, 14 aa, synthetic construct
  REGION 1..14: note = Description of Artificial Sequence: Synthetic peptide
DGDMVAPIKGSFDY

SEQ ID NO: 1172 - protein, 17 aa, synthetic construct
  REGION 1..17: note = Description of Artificial Sequence: Synthetic peptide
RSSQSLLNSDDGNTYLD

SEQ ID NO: 1173 - protein, 7 aa, synthetic construct
  REGION 1..7: note = Description of Artificial Sequence: Synthetic peptide
TLSYRAS

SEQ ID NO: 1174 - protein, 9 aa, synthetic construct
  REGION 1..9: note = Description of Artificial Sequence: Synthetic peptide
MQRIEFPIT

SEQ ID NO: 1175 - protein, 6 aa, synthetic construct
  REGION 1..6: note = Description of Artificial Sequence: Synthetic peptide
SSYTMN

SEQ ID NO: 1176 - protein, 13 aa, synthetic construct
  REGION 1..13: note = Description of Artificial Sequence: Synthetic peptide
WVSSISTSSSYID

SEQ ID NO: 1177 - protein, 15 aa, synthetic construct
  REGION 1..15: note = Description of Artificial Sequence: Synthetic peptide
ARDGDMVAPIKGSFD

SEQ ID NO: 1178 - protein, 13 aa, synthetic construct
  REGION 1..13: note = Description of Artificial Sequence: Synthetic peptide
LNSDDGNTYLDWY

SEQ ID NO: 1179 - protein, 10 aa, synthetic construct
  REGION 1..10: note = Description of Artificial Sequence: Synthetic peptide
LLIYTLSYRA

SEQ ID NO: 1180 - protein, 8 aa, synthetic construct
  REGION 1..8: note = Description of Artificial Sequence: Synthetic peptide
MQRIEFPI

SEQ ID NO: 1181 - protein, 8 aa, synthetic construct
  REGION 1..8: note = Description of Artificial Sequence: Synthetic peptide
GFTFSSYT

SEQ ID NO: 1182 - protein, 8 aa, synthetic construct
  REGION 1..8: note = Description of Artificial Sequence: Synthetic peptide
ISTSSSYI

SEQ ID NO: 1183 - protein, 16 aa, synthetic construct
  REGION 1..16: note = Description of Artificial Sequence: Synthetic peptide
ARDGDMVAPIKGSFDY

SEQ ID NO: 1184 - protein, 12 aa, synthetic construct
  REGION 1..12: note = Description of Artificial Sequence: Synthetic peptide
QSLLNSDDGNTY

SEQ ID NO: 1185 - skipped

SEQ ID NO: 1186 - protein, 9 aa, synthetic construct
  REGION 1..9: note = Description of Artificial Sequence: Synthetic peptide
MQRIEFPIT

SEQ ID NO: 1187 - protein, 123 aa, synthetic construct
  REGION 1..123: note = Description of Artificial Sequence: Synthetic polypeptide
EVQLVESGGGLVKPGGSLRLSCAVSGFTFSSYTMNWVRQAPGKGLEWVSSISTSSSYIDYADSVKGRFTISRDNAKKSLYLQMNSLRAEDTAVYYCARDGDMVAPIKGSFDYWGQGTLVTVSS

SEQ ID NO: 1188 - protein, 113 aa, synthetic construct
  REGION 1..113: note = Description of Artificial Sequence: Synthetic polypeptide
EIVLTQSPLSLPVTPGEPASISCRSSQSLLNSDDGNTYLDWYLQKPGQSPQLLIYTLSYRASGVPDRFSGSGSGTDFTLKISRVEAEDVGVYYCMQRIEFPITFGQGTRLEIK

SEQ ID NO: 1189 - protein, 453 aa, synthetic construct
  REGION 1..453: note = Description of Artificial Sequence: Synthetic polypeptide
EVQLVESGGGLVKPGGSLRLSCAVSGFTFSSYTMNWVRQAPGKGLEWVSSISTSSSYIDYADSVKGRFTISRDNAKKSLYLQMNSLRAEDTAVYYCARDGDMVAPIKGSFDYWGQGTLVTVSSASTKGPSVFPLAPSSKSTSGGTAALGCLVKDYFPEPVTVSWNSGALTSGVHTFPAVLQSSGLYSLSSVVTVPSSSLGTQTYICNVNHKPSNTKVDKKVEPKSCDKTHTCPPCPAPELLGGPSVFLFPPKPKDTLMISRTPEVTCVVVDVSHEDPEVKFNWYVDGVEVHNAKTKPREEQYNSTYRVVSVLTVLHQDWLNGKEYKCKVSNKALPAPIEKTISKAKGQPREPQVYTLPPSREEMTKNQVSLTCLVKGFYPSDIAVEWESNGQPENNYKTTPPVLDSDGSFFLYSKLTVDKSRWQQGNVFSCSVMHEALHNHYTQKSLSLSPGK

SEQ ID NO: 1190 - protein, 220 aa, synthetic construct
  REGION 1..220: note = Description of Artificial Sequence: Synthetic polypeptide
EIVLTQSPLSLPVTPGEPASISCRSSQSLLNSDDGNTYLDWYLQKPGQSPQLLIYTLSYRASGVPDRFSGSGSGTDFTLKISRVEAEDVGVYYCMQRIEFPITFGQGTRLEIKRTVAAPSVFIFPPSDEQLKSGTASVVCLLNNFYPREAKVQWKVDNALQSGNSQESVTEQDSKDSTYSLSSTLTLSKADYEKHKVYACEVTHQGLSSPVTKSFNRGEC

SEQ ID NO: 1191 - protein, 7 aa, synthetic construct
  REGION 1..7: note = Description of Artificial Sequence: Synthetic peptide
SSGMCVS

SEQ ID NO: 1192 - protein, 16 aa, synthetic construct
  REGION 1..16: note = Description of Artificial Sequence: Synthetic peptide
LIDWFDDKYYSTSLKT

SEQ ID NO: 1193 - protein, 13 aa, synthetic construct
  REGION 1..13: note = Description of Artificial Sequence: Synthetic peptide
IRGTGAYYYGLDV

SEQ ID NO: 1194 - protein, 11 aa, synthetic construct
  REGION 1..11: note = Description of Artificial Sequence: Synthetic peptide
SGNELGDKYAS

SEQ ID NO: 1195 - protein, 7 aa, synthetic construct
  REGION 1..7: note = Description of Artificial Sequence: Synthetic peptide
QDNKRPS

SEQ ID NO: 1196 - protein, 9 aa, synthetic construct
  REGION 1..9: note = Description of Artificial Sequence: Synthetic peptide
QAWDSSKVV

SEQ ID NO: 1197 - protein, 9 aa, synthetic construct
  REGION 1..9: note = Description of Artificial Sequence: Synthetic peptide
GFSLSSSGM

SEQ ID NO: 1198 - protein, 5 aa, synthetic construct
  REGION 1..5: note = Description of Artificial Sequence: Synthetic peptide
DWFDD

SEQ ID NO: 1199 - protein, 12 aa, synthetic construct
  REGION 1..12: note = Description of Artificial Sequence: Synthetic peptide
IRGTGAYYYGLD

SEQ ID NO: 1200 - protein, 7 aa, synthetic construct
  REGION 1..7: note = Description of Artificial Sequence: Synthetic peptide
NELGDKY

SEQ ID NO: 1201 - skipped

SEQ ID NO: 1202 - protein, 6 aa, synthetic construct
  REGION 1..6: note = Description of Artificial Sequence: Synthetic peptide
WDSSKV

SEQ ID NO: 1203 - protein, 12 aa, synthetic construct
  REGION 1..12: note = Description of Artificial Sequence: Synthetic peptide
GFSLSSSGMCVS

SEQ ID NO: 1204 - protein, 9 aa, synthetic construct
  REGION 1..9: note = Description of Artificial Sequence: Synthetic peptide
LIDWFDDKY

SEQ ID NO: 1205 - protein, 13 aa, synthetic construct
  REGION 1..13: note = Description of Artificial Sequence: Synthetic peptide
IRGTGAYYYGLDV

SEQ ID NO: 1206 - protein, 11 aa, synthetic construct
  REGION 1..11: note = Description of Artificial Sequence: Synthetic peptide
SGNELGDKYAS

SEQ ID NO: 1207 - protein, 7 aa, synthetic construct
  REGION 1..7: note = Description of Artificial Sequence: Synthetic peptide
QDNKRPS

SEQ ID NO: 1208 - protein, 9 aa, synthetic construct
  REGION 1..9: note = Description of Artificial Sequence: Synthetic peptide
QAWDSSKVV

SEQ ID NO: 1209 - protein, 8 aa, synthetic construct
  REGION 1..8: note = Description of Artificial Sequence: Synthetic peptide
SSSGMCVS

SEQ ID NO: 1210 - protein, 12 aa, synthetic construct
  REGION 1..12: note = Description of Artificial Sequence: Synthetic peptide
WLTLIDWFDDKY

SEQ ID NO: 1211 - protein, 14 aa, synthetic construct
  REGION 1..14: note = Description of Artificial Sequence: Synthetic peptide
ARIRGTGAYYYGLD

SEQ ID NO: 1212 - protein, 7 aa, synthetic construct
  REGION 1..7: note = Description of Artificial Sequence: Synthetic peptide
DKYASWY

SEQ ID NO: 1213 - protein, 10 aa, synthetic construct
  REGION 1..10: note = Description of Artificial Sequence: Synthetic peptide
LVIYQDNKRP

SEQ ID NO: 1214 - protein, 8 aa, synthetic construct
  REGION 1..8: note = Description of Artificial Sequence: Synthetic peptide
QAWDSSKV

SEQ ID NO: 1215 - protein, 10 aa, synthetic construct
  REGION 1..10: note = Description of Artificial Sequence: Synthetic peptide
GFSLSSSGMC

SEQ ID NO: 1216 - protein, 7 aa, synthetic construct
  REGION 1..7: note = Description of Artificial Sequence: Synthetic peptide
IDWFDDK

SEQ ID NO: 1217 - protein, 15 aa, synthetic construct
  REGION 1..15: note = Description of Artificial Sequence: Synthetic peptide
ARIRGTGAYYYGLDV

SEQ ID NO: 1218 - protein, 6 aa, synthetic construct
  REGION 1..6: note = Description of Artificial Sequence: Synthetic peptide
ELGDKY

SEQ ID NO: 1219 - skipped

SEQ ID NO: 1220 - protein, 9 aa, synthetic construct
  REGION 1..9: note = Description of Artificial Sequence: Synthetic peptide
QAWDSSKVV

SEQ ID NO: 1221 - protein, 123 aa, synthetic construct
  REGION 1..123: note = Description of Artificial Sequence: Synthetic polypeptide
QVQLQESGPALVKPTQTLTLTCTFSGFSLSSSGMCVSWIRQPPGKALEWLTLIDWFDDKYYSTSLKTRLTISKDTSKNQVVLTMTNMDPVDTATYYCARIRGTGAYYYGLDVWGQGTMVTVSS

SEQ ID NO: 1222 - protein, 106 aa, synthetic construct
  REGION 1..106: note = Description of Artificial Sequence: Synthetic polypeptide
SYELMQPPSVSVSPGQTASITCSGNELGDKYASWYQQQPGQSPVLVIYQDNKRPSGIPERFSGSNSGNTATLTISGTQAMDEADYYCQAWDSSKVVFGGGTKLTVL

SEQ ID NO: 1223 - protein, 453 aa, synthetic construct
  REGION 1..453: note = Description of Artificial Sequence: Synthetic polypeptide
QVQLQESGPALVKPTQTLTLTCTFSGFSLSSSGMCVSWIRQPPGKALEWLTLIDWFDDKYYSTSLKTRLTISKDTSKNQVVLTMTNMDPVDTATYYCARIRGTGAYYYGLDVWGQGTMVTVSSASTKGPSVFPLAPSSKSTSGGTAALGCLVKDYFPEPVTVSWNSGALTSGVHTFPAVLQSSGLYSLSSVVTVPSSSLGTQTYICNVNHKPSNTKVDKKVEPKSCDKTHTCPPCPAPELLGGPSVFLFPPKPKDTLMISRTPEVTCVVVDVSHEDPEVKFNWYVDGVEVHNAKTKPREEQYNSTYRVVSVLTVLHQDWLNGKEYKCKVSNKALPAPIEKTISKAKGQPREPQVYTLPPSREEMTKNQVSLTCLVKGFYPSDIAVEWESNGQPENNYKTTPPVLDSDGSFFLYSKLTVDKSRWQQGNVFSCSVMHEALHNHYTQKSLSLSPGK

SEQ ID NO: 1224 - protein, 212 aa, synthetic construct
  REGION 1..212: note = Description of Artificial Sequence: Synthetic polypeptide
SYELMQPPSVSVSPGQTASITCSGNELGDKYASWYQQQPGQSPVLVIYQDNKRPSGIPERFSGSNSGNTATLTISGTQAMDEADYYCQAWDSSKVVFGGGTKLTVLGQPKAAPSVTLFPPSSEELQANKATLVCLISDFYPGAVTVAWKADSSPVKAGVETTTPSKQSNNKYAASSYLSLTPEQWKSHRSYSCQVTHEGSTVEKTVAPTECS

SEQ ID NO: 1225 - protein, 5 aa, synthetic construct
  REGION 1..5: note = Description of Artificial Sequence: Synthetic peptide
NYDMN

SEQ ID NO: 1226 - protein, 17 aa, synthetic construct
  REGION 1..17: note = Description of Artificial Sequence: Synthetic peptide
SISSSSSYIYYADSVKG

SEQ ID NO: 1227 - protein, 15 aa, synthetic construct
  REGION 1..15: note = Description of Artificial Sequence: Synthetic peptide
DVGVTTDYYYYGMDV

SEQ ID NO: 1228 - protein, 12 aa, synthetic construct
  REGION 1..12: note = Description of Artificial Sequence: Synthetic peptide
RASQSVASSYLA

SEQ ID NO: 1229 - protein, 7 aa, synthetic construct
  REGION 1..7: note = Description of Artificial Sequence: Synthetic peptide
GASSRAT

SEQ ID NO: 1230 - protein, 10 aa, synthetic construct
  REGION 1..10: note = Description of Artificial Sequence: Synthetic peptide
QQYGSSPPYT

SEQ ID NO: 1231 - protein, 7 aa, synthetic construct
  REGION 1..7: note = Description of Artificial Sequence: Synthetic peptide
GFTFSNY

SEQ ID NO: 1232 - protein, 6 aa, synthetic construct
  REGION 1..6: note = Description of Artificial Sequence: Synthetic peptide
SSSSSY

SEQ ID NO: 1233 - protein, 14 aa, synthetic construct
  REGION 1..14: note = Description of Artificial Sequence: Synthetic peptide
DVGVTTDYYYYGMD

SEQ ID NO: 1234 - protein, 8 aa, synthetic construct
  REGION 1..8: note = Description of Artificial Sequence: Synthetic peptide
SQSVASSY

SEQ ID NO: 1235 - skipped

SEQ ID NO: 1236 - protein, 7 aa, synthetic construct
  REGION 1..7: note = Description of Artificial Sequence: Synthetic peptide
YGSSPPY

SEQ ID NO: 1237 - protein, 10 aa, synthetic construct
  REGION 1..10: note = Description of Artificial Sequence: Synthetic peptide
GFTFSNYDMN

SEQ ID NO: 1238 - protein, 10 aa, synthetic construct
  REGION 1..10: note = Description of Artificial Sequence: Synthetic peptide
SISSSSSYIY

SEQ ID NO: 1239 - protein, 15 aa, synthetic construct
  REGION 1..15: note = Description of Artificial Sequence: Synthetic peptide
DVGVTTDYYYYGMDV

SEQ ID NO: 1240 - protein, 12 aa, synthetic construct
  REGION 1..12: note = Description of Artificial Sequence: Synthetic peptide
RASQSVASSYLA

SEQ ID NO: 1241 - protein, 7 aa, synthetic construct
  REGION 1..7: note = Description of Artificial Sequence: Synthetic peptide
GASSRAT

SEQ ID NO: 1242 - protein, 10 aa, synthetic construct
  REGION 1..10: note = Description of Artificial Sequence: Synthetic peptide
QQYGSSPPYT

SEQ ID NO: 1243 - protein, 6 aa, synthetic construct
  REGION 1..6: note = Description of Artificial Sequence: Synthetic peptide
SNYDMN

SEQ ID NO: 1244 - protein, 13 aa, synthetic construct
  REGION 1..13: note = Description of Artificial Sequence: Synthetic peptide
WVSSISSSSSYIY

SEQ ID NO: 1245 - protein, 16 aa, synthetic construct
  REGION 1..16: note = Description of Artificial Sequence: Synthetic peptide
ARDVGVTTDYYYYGMD

SEQ ID NO: 1246 - protein, 8 aa, synthetic construct
  REGION 1..8: note = Description of Artificial Sequence: Synthetic peptide
ASSYLAWY

SEQ ID NO: 1247 - protein, 10 aa, synthetic construct
  REGION 1..10: note = Description of Artificial Sequence: Synthetic peptide
LLIYGASSRA

SEQ ID NO: 1248 - protein, 9 aa, synthetic construct
  REGION 1..9: note = Description of Artificial Sequence: Synthetic peptide
QQYGSSPPY

SEQ ID NO: 1249 - protein, 8 aa, synthetic construct
  REGION 1..8: note = Description of Artificial Sequence: Synthetic peptide
GFTFSNYD

SEQ ID NO: 1250 - protein, 8 aa, synthetic construct
  REGION 1..8: note = Description of Artificial Sequence: Synthetic peptide
ISSSSSYI

SEQ ID NO: 1251 - protein, 17 aa, synthetic construct
  REGION 1..17: note = Description of Artificial Sequence: Synthetic peptide
ARDVGVTTDYYYYGMDV

SEQ ID NO: 1252 - protein, 7 aa, synthetic construct
  REGION 1..7: note = Description of Artificial Sequence: Synthetic peptide
QSVASSY

SEQ ID NO: 1253 - skipped

SEQ ID NO: 1254 - protein, 10 aa, synthetic construct
  REGION 1..10: note = Description of Artificial Sequence: Synthetic peptide
QQYGSSPPYT

SEQ ID NO: 1255 - protein, 124 aa, synthetic construct; identical to SEQ ID NO: 201
  REGION 1..124: note = Description of Artificial Sequence: Synthetic polypeptide

SEQ ID NO: 1256 - protein, 109 aa, synthetic construct
  REGION 1..109: note = Description of Artificial Sequence: Synthetic polypeptide
EIVMTQSPGTLSLSPGDRATLSCRASQSVASSYLAWYQQKPGQSPRLLIYGASSRATGIPDRFSGSGSGTDFTLTISRLEPEDFAVYYCQQYGSSPPYTFGQGTKVEIK

SEQ ID NO: 1257 - protein, 454 aa, synthetic construct; identical to SEQ ID NO: 203
  REGION 1..454: note = Description of Artificial Sequence: Synthetic polypeptide

SEQ ID NO: 1258 - protein, 216 aa, synthetic construct
  REGION 1..216: note = Description of Artificial Sequence: Synthetic polypeptide
EIVMTQSPGTLSLSPGDRATLSCRASQSVASSYLAWYQQKPGQSPRLLIYGASSRATGIPDRFSGSGSGTDFTLTISRLEPEDFAVYYCQQYGSSPPYTFGQGTKVEIKRTVAAPSVFIFPPSDEQLKSGTASVVCLLNNFYPREAKVQWKVDNALQSGNSQESVTEQDSKDSTYSLSSTLTLSKADYEKHKVYACEVTHQGLSSPVTKSFNRGEC

SEQ ID NO: 1259 - protein, 5 aa, synthetic construct
  REGION 1..5: note = Description of Artificial Sequence: Synthetic peptide
SYGMY

SEQ ID NO: 1260 - protein, 17 aa, synthetic construct
  REGION 1..17: note = Description of Artificial Sequence: Synthetic peptide
SISTGSSYIYYADSVKG

SEQ ID NO: 1261 - protein, 13 aa, synthetic construct
  REGION 1..13: note = Description of Artificial Sequence: Synthetic peptide
DKGLAVTGYIMDV

SEQ ID NO: 1262 - protein, 11 aa, synthetic construct
  REGION 1..11: note = Description of Artificial Sequence: Synthetic peptide
QASQDISNYLN

SEQ ID NO: 1263 - protein, 7 aa, synthetic construct
  REGION 1..7: note = Description of Artificial Sequence: Synthetic peptide
DASNLET

SEQ ID NO: 1264 - protein, 10 aa, synthetic construct
  REGION 1..10: note = Description of Artificial Sequence: Synthetic peptide
QQYDNLPMYT

SEQ ID NO: 1265 - protein, 7 aa, synthetic construct
  REGION 1..7: note = Description of Artificial Sequence: Synthetic peptide
GFTFSSY

SEQ ID NO: 1266 - protein, 6 aa, synthetic construct
  REGION 1..6: note = Description of Artificial Sequence: Synthetic peptide
STGSSY

SEQ ID NO: 1267 - protein, 12 aa, synthetic construct
  REGION 1..12: note = Description of Artificial Sequence: Synthetic peptide
DKGLAVTGYIMD

SEQ ID NO: 1268 - protein, 7 aa, synthetic construct
  REGION 1..7: note = Description of Artificial Sequence: Synthetic peptide
SQDISNY

SEQ ID NO: 1269 - skipped

SEQ ID NO: 1270 - protein, 7 aa, synthetic construct
  REGION 1..7: note = Description of Artificial Sequence: Synthetic peptide
YDNLPMY

SEQ ID NO: 1271 - protein, 10 aa, synthetic construct
  REGION 1..10: note = Description of Artificial Sequence: Synthetic peptide
GFTFSSYGMY

SEQ ID NO: 1272 - protein, 10 aa, synthetic construct
  REGION 1..10: note = Description of Artificial Sequence: Synthetic peptide
SISTGSSYIY

SEQ ID NO: 1273 - protein, 13 aa, synthetic construct
  REGION 1..13: note = Description of Artificial Sequence: Synthetic peptide
DKGLAVTGYIMDV

SEQ ID NO: 1274 - protein, 11 aa, synthetic construct
  REGION 1..11: note = Description of Artificial Sequence: Synthetic peptide
QASQDISNYLN

SEQ ID NO: 1275 - protein, 7 aa, synthetic construct
  REGION 1..7: note = Description of Artificial Sequence: Synthetic peptide
DASNLET

SEQ ID NO: 1276 - protein, 10 aa, synthetic construct
  REGION 1..10: note = Description of Artificial Sequence: Synthetic peptide
QQYDNLPMYT

SEQ ID NO: 1277 - protein, 6 aa, synthetic construct
  REGION 1..6: note = Description of Artificial Sequence: Synthetic peptide
SSYGMY

SEQ ID NO: 1278 - protein, 13 aa, synthetic construct
  REGION 1..13: note = Description of Artificial Sequence: Synthetic peptide
WVSSISTGSSYIY

SEQ ID NO: 1279 - protein, 14 aa, synthetic construct
  REGION 1..14: note = Description of Artificial Sequence: Synthetic peptide
ARDKGLAVTGYIMD

SEQ ID NO: 1280 - protein, 7 aa, synthetic construct
  REGION 1..7: note = Description of Artificial Sequence: Synthetic peptide
SNYLNWY

SEQ ID NO: 1281 - protein, 10 aa, synthetic construct
  REGION 1..10: note = Description of Artificial Sequence: Synthetic peptide
LLIYDASNLE

SEQ ID NO: 1282 - protein, 9 aa, synthetic construct
  REGION 1..9: note = Description of Artificial Sequence: Synthetic peptide
QQYDNLPMY

SEQ ID NO: 1283 - protein, 8 aa, synthetic construct
  REGION 1..8: note = Description of Artificial Sequence: Synthetic peptide
GFTFSSYG

SEQ ID NO: 1284 - protein, 8 aa, synthetic construct
  REGION 1..8: note = Description of Artificial Sequence: Synthetic peptide
ISTGSSYI

SEQ ID NO: 1285 - protein, 15 aa, synthetic construct
  REGION 1..15: note = Description of Artificial Sequence: Synthetic peptide
ARDKGLAVTGYIMDV

SEQ ID NO: 1286 - protein, 6 aa, synthetic construct
  REGION 1..6: note = Description of Artificial Sequence: Synthetic peptide
QDISNY

SEQ ID NO: 1287 - skipped

SEQ ID NO: 1288 - protein, 10 aa, synthetic construct
  REGION 1..10: note = Description of Artificial Sequence: Synthetic peptide
QQYDNLPMYT

SEQ ID NO: 1289 - protein, 122 aa, synthetic construct
  REGION 1..122: note = Description of Artificial Sequence: Synthetic polypeptide
QVQLVESGGGLVKPGGSLRLSCASSGFTFSSYGMYWVRQAPGKGLEWVSSISTGSSYIYYADSVKGRFTISRDNAKNSLYLQMNSLRAEDTAVYYCARDKGLAVTGYIMDVWGQGTTVTVSS

SEQ ID NO: 1290 - protein, 108 aa, synthetic construct
  REGION 1..108: note = Description of Artificial Sequence: Synthetic polypeptide
EIVLTQSPSSLSASVGDRVTITCQASQDISNYLNWYQQKPGKAPKLLIYDASNLETGVPSRFSGSGSGTDFTFTISSLQPEDIAIYYCQQYDNLPMYTFGQGTKVEIK

SEQ ID NO: 1291 - protein, 452 aa, synthetic construct
  REGION 1..452: note = Description of Artificial Sequence: Synthetic polypeptide
QVQLVESGGGLVKPGGSLRLSCASSGFTFSSYGMYWVRQAPGKGLEWVSSISTGSSYIYYADSVKGRFTISRDNAKNSLYLQMNSLRAEDTAVYYCARDKGLAVTGYIMDVWGQGTTVTVSSASTKGPSVFPLAPSSKSTSGGTAALGCLVKDYFPEPVTVSWNSGALTSGVHTFPAVLQSSGLYSLSSVVTVPSSSLGTQTYICNVNHKPSNTKVDKKVEPKSCDKTHTCPPCPAPELLGGPSVFLFPPKPKDTLMISRTPEVTCVVVDVSHEDPEVKFNWYVDGVEVHNAKTKPREEQYNSTYRVVSVLTVLHQDWLNGKEYKCKVSNKALPAPIEKTISKAKGQPREPQVYTLPPSREEMTKNQVSLTCLVKGFYPSDIAVEWESNGQPENNYKTTPPVLDSDGSFFLYSKLTVDKSRWQQGNVFSCSVMHEALHNHYTQKSLSLSPGK

SEQ ID NO: 1292 - protein, 215 aa, synthetic construct
  REGION 1..215: note = Description of Artificial Sequence: Synthetic polypeptide
EIVLTQSPSSLSASVGDRVTITCQASQDISNYLNWYQQKPGKAPKLLIYDASNLETGVPSRFSGSGSGTDFTFTISSLQPEDIAIYYCQQYDNLPMYTFGQGTKVEIKRTVAAPSVFIFPPSDEQLKSGTASVVCLLNNFYPREAKVQWKVDNALQSGNSQESVTEQDSKDSTYSLSSTLTLSKADYEKHKVYACEVTHQGLSSPVTKSFNRGEC

SEQ ID NO: 1293 - protein, 5 aa, synthetic construct
  REGION 1..5: note = Description of Artificial Sequence: Synthetic peptide
NYDMN

SEQ ID NO: 1294 - protein, 17 aa, synthetic construct
  REGION 1..17: note = Description of Artificial Sequence: Synthetic peptide
SISSSSSYIYYADSVKG

SEQ ID NO: 1295 - protein, 15 aa, synthetic construct
  REGION 1..15: note = Description of Artificial Sequence: Synthetic peptide
DVGVTTDYYYYGMDV

SEQ ID NO: 1296 - protein, 12 aa, synthetic construct
  REGION 1..12: note = Description of Artificial Sequence: Synthetic peptide
RASQSVASSYLA

SEQ ID NO: 1297 - protein, 7 aa, synthetic construct
  REGION 1..7: note = Description of Artificial Sequence: Synthetic peptide
GASSRAT

SEQ ID NO: 1298 - protein, 10 aa, synthetic construct
  REGION 1..10: note = Description of Artificial Sequence: Synthetic peptide
QQYGSSPPYT

SEQ ID NO: 1299 - protein, 7 aa, synthetic construct
  REGION 1..7: note = Description of Artificial Sequence: Synthetic peptide
GFTFSNY

SEQ ID NO: 1300 - protein, 6 aa, synthetic construct
  REGION 1..6: note = Description of Artificial Sequence: Synthetic peptide
SSSSSY

SEQ ID NO: 1301 - protein, 14 aa, synthetic construct
  REGION 1..14: note = Description of Artificial Sequence: Synthetic peptide
DVGVTTDYYYYGMD

SEQ ID NO: 1302 - protein, 8 aa, synthetic construct
  REGION 1..8: note = Description of Artificial Sequence: Synthetic peptide
SQSVASSY

SEQ ID NO: 1303 - skipped

SEQ ID NO: 1304 - protein, 7 aa, synthetic construct
  REGION 1..7: note = Description of Artificial Sequence: Synthetic peptide
YGSSPPY

SEQ ID NO: 1305 - protein, 10 aa, synthetic construct
  REGION 1..10: note = Description of Artificial Sequence: Synthetic peptide
GFTFSNYDMN

SEQ ID NO: 1306 - protein, 10 aa, synthetic construct
  REGION 1..10: note = Description of Artificial Sequence: Synthetic peptide
SISSSSSYIY

SEQ ID NO: 1307 - protein, 15 aa, synthetic construct
  REGION 1..15: note = Description of Artificial Sequence: Synthetic peptide
DVGVTTDYYYYGMDV

SEQ ID NO: 1308 - protein, 12 aa, synthetic construct
  REGION 1..12: note = Description of Artificial Sequence: Synthetic peptide
RASQSVASSYLA

SEQ ID NO: 1309 - protein, 7 aa, synthetic construct
  REGION 1..7: note = Description of Artificial Sequence: Synthetic peptide
GASSRAT

SEQ ID NO: 1310 - protein, 10 aa, synthetic construct
  REGION 1..10: note = Description of Artificial Sequence: Synthetic peptide
QQYGSSPPYT

SEQ ID NO: 1311 - protein, 6 aa, synthetic construct
  REGION 1..6: note = Description of Artificial Sequence: Synthetic peptide
SNYDMN

SEQ ID NO: 1312 - protein, 13 aa, synthetic construct
  REGION 1..13: note = Description of Artificial Sequence: Synthetic peptide
WVSSISSSSSYIY

SEQ ID NO: 1313 - protein, 16 aa, synthetic construct
  REGION 1..16: note = Description of Artificial Sequence: Synthetic peptide
ARDVGVTTDYYYYGMD

SEQ ID NO: 1314 - protein, 8 aa, synthetic construct
  REGION 1..8: note = Description of Artificial Sequence: Synthetic peptide
ASSYLAWY

SEQ ID NO: 1315 - protein, 10 aa, synthetic construct
  REGION 1..10: note = Description of Artificial Sequence: Synthetic peptide
LLIYGASSRA

SEQ ID NO: 1316 - protein, 9 aa, synthetic construct
  REGION 1..9: note = Description of Artificial Sequence: Synthetic peptide
QQYGSSPPY

SEQ ID NO: 1317 - protein, 8 aa, synthetic construct
  REGION 1..8: note = Description of Artificial Sequence: Synthetic peptide
GFTFSNYD

SEQ ID NO: 1318 - protein, 8 aa, synthetic construct
  REGION 1..8: note = Description of Artificial Sequence: Synthetic peptide
ISSSSSYI

SEQ ID NO: 1319 - protein, 17 aa, synthetic construct
  REGION 1..17: note = Description of Artificial Sequence: Synthetic peptide
ARDVGVTTDYYYYGMDV

SEQ ID NO: 1320 - protein, 7 aa, synthetic construct
  REGION 1..7: note = Description of Artificial Sequence: Synthetic peptide
QSVASSY

SEQ ID NO: 1321 - skipped

SEQ ID NO: 1322 - protein, 10 aa, synthetic construct
  REGION 1..10: note = Description of Artificial Sequence: Synthetic peptide
QQYGSSPPYT

SEQ ID NO: 1323 - protein, 124 aa, synthetic construct; identical to SEQ ID NO: 371
  REGION 1..124: note = Description of Artificial Sequence: Synthetic polypeptide

SEQ ID NO: 1324 - protein, 109 aa, synthetic construct
  REGION 1..109: note = Description of Artificial Sequence: Synthetic polypeptide
DIVMTQSPGTLSLSPGDRATLSCRASQSVASSYLAWYQQKPGQSPRLLIYGASSRATGIPDRFSGSGSGTDFTLTISRLEPEDFAVYYCQQYGSSPPYTFGQGTKVEIK

SEQ ID NO: 1325 - protein, 454 aa, synthetic construct; identical to SEQ ID NO: 373
  REGION 1..454: note = Description of Artificial Sequence: Synthetic polypeptide

SEQ ID NO: 1326 - protein, 216 aa, synthetic construct
  REGION 1..216: note = Description of Artificial Sequence: Synthetic polypeptide
DIVMTQSPGTLSLSPGDRATLSCRASQSVASSYLAWYQQKPGQSPRLLIYGASSRATGIPDRFSGSGSGTDFTLTISRLEPEDFAVYYCQQYGSSPPYTFGQGTKVEIKRTVAAPSVFIFPPSDEQLKSGTASVVCLLNNFYPREAKVQWKVDNALQSGNSQESVTEQDSKDSTYSLSSTLTLSKADYEKHKVYACEVTHQGLSSPVTKSFNRGEC

SEQ ID NO: 1327 - protein, 5 aa, synthetic construct
  REGION 1..5: note = Description of Artificial Sequence: Synthetic peptide
RYSMN

SEQ ID NO: 1328 - protein, 17 aa, synthetic construct
  REGION 1..17: note = Description of Artificial Sequence: Synthetic peptide
SISSSSSYIYYADSVKG

SEQ ID NO: 1329 - protein, 13 aa, synthetic construct
  REGION 1..13: note = Description of Artificial Sequence: Synthetic peptide
DGPTVNWDYYFDL

SEQ ID NO: 1330 - protein, 13 aa, synthetic construct
  REGION 1..13: note = Description of Artificial Sequence: Synthetic peptide
SGSSSNIGNNYVS

SEQ ID NO: 1331 - protein, 7 aa, synthetic construct
  REGION 1..7: note = Description of Artificial Sequence: Synthetic peptide
DNNKRPS

SEQ ID NO: 1332 - protein, 12 aa, synthetic construct
  REGION 1..12: note = Description of Artificial Sequence: Synthetic peptide
GTWDSSLSTSVV

SEQ ID NO: 1333 - protein, 7 aa, synthetic construct
  REGION 1..7: note = Description of Artificial Sequence: Synthetic peptide
GFTFSRY

SEQ ID NO: 1334 - protein, 6 aa, synthetic construct
  REGION 1..6: note = Description of Artificial Sequence: Synthetic peptide
SSSSSY

SEQ ID NO: 1335 - protein, 12 aa, synthetic construct
  REGION 1..12: note = Description of Artificial Sequence: Synthetic peptide
DGPTVNWDYYFD

SEQ ID NO: 1336 - protein, 9 aa, synthetic construct
  REGION 1..9: note = Description of Artificial Sequence: Synthetic peptide
SSSNIGNNY

SEQ ID NO: 1337 - skipped

SEQ ID NO: 1338 - protein, 9 aa, synthetic construct
  REGION 1..9: note = Description of Artificial Sequence: Synthetic peptide
WDSSLSTSV

SEQ ID NO: 1339 - protein, 10 aa, synthetic construct
  REGION 1..10: note = Description of Artificial Sequence: Synthetic peptide
GFTFSRYSMN

SEQ ID NO: 1340 - protein, 10 aa, synthetic construct
  REGION 1..10: note = Description of Artificial Sequence: Synthetic peptide
SISSSSSYIY

SEQ ID NO: 1341 - protein, 13 aa, synthetic construct
  REGION 1..13: note = Description of Artificial Sequence: Synthetic peptide
DGPTVNWDYYFDL

SEQ ID NO: 1342 - protein, 13 aa, synthetic construct
  REGION 1..13: note = Description of Artificial Sequence: Synthetic peptide
SGSSSNIGNNYVS

SEQ ID NO: 1343 - protein, 7 aa, synthetic construct
  REGION 1..7: note = Description of Artificial Sequence: Synthetic peptide
DNNKRPS

SEQ ID NO: 1344 - protein, 12 aa, synthetic construct
  REGION 1..12: note = Description of Artificial Sequence: Synthetic peptide
GTWDSSLSTSVV

SEQ ID NO: 1345 - protein, 6 aa, synthetic construct
  REGION 1..6: note = Description of Artificial Sequence: Synthetic peptide
SRYSMN

SEQ ID NO: 1346 - protein, 13 aa, synthetic construct
  REGION 1..13: note = Description of Artificial Sequence: Synthetic peptide
GVSSISSSSSYIY

SEQ ID NO: 1347 - protein, 14 aa, synthetic construct
  REGION 1..14: note = Description of Artificial Sequence: Synthetic peptide
ARDGPTVNWDYYFD

SEQ ID NO: 1348 - protein, 9 aa, synthetic construct
  REGION 1..9: note = Description of Artificial Sequence: Synthetic peptide
IGNNYVSWY

SEQ ID NO: 1349 - protein, 10 aa, synthetic construct
  REGION 1..10: note = Description of Artificial Sequence: Synthetic peptide
LLIYDNNKRP

SEQ ID NO: 1350 - protein, 11 aa, synthetic construct
  REGION 1..11: note = Description of Artificial Sequence: Synthetic peptide
GTWDSSLSTSV

SEQ ID NO: 1351 - protein, 8 aa, synthetic construct
  REGION 1..8: note = Description of Artificial Sequence: Synthetic peptide
GFTFSRYS

SEQ ID NO: 1352 - protein, 8 aa, synthetic construct
  REGION 1..8: note = Description of Artificial Sequence: Synthetic peptide
ISSSSSYI

SEQ ID NO: 1353 - protein, 15 aa, synthetic construct
  REGION 1..15: note = Description of Artificial Sequence: Synthetic peptide
ARDGPTVNWDYYFDL

SEQ ID NO: 1354 - protein, 8 aa, synthetic construct
  REGION 1..8: note = Description of Artificial Sequence: Synthetic peptide
SSNIGNNY

SEQ ID NO: 1355 - skipped

SEQ ID NO: 1356 - protein, 12 aa, synthetic construct
  REGION 1..12: note = Description of Artificial Sequence: Synthetic peptide
GTWDSSLSTSVV

SEQ ID NO: 1357 - protein, 122 aa, synthetic construct
  REGION 1..122: note = Description of Artificial Sequence: Synthetic polypeptide
EVQLVQSGGGLVKPGGSLRLSCAASGFTFSRYSMNWVRQAPGKGLEGVSSISSSSSYIYYADSVKGRFTISRDNAKNSLYLQMNSLRAEDTAVYYCARDGPTVNWDYYFDLWGRGTLVTVSS

SEQ ID NO: 1358 - protein, 111 aa, synthetic construct
  REGION 1..111: note = Description of Artificial Sequence: Synthetic polypeptide
QSVLTQPPSVSAAPGQKVTISCSGSSSNIGNNYVSWYQQLPGTAPKLLIYDNNKRPSGIPDRFSGSKSGTSATLGITGLQTGDEADYYCGTWDSSLSTSVVFGGGTKLTVL

SEQ ID NO: 1359 - protein, 452 aa, synthetic construct
  REGION 1..452: note = Description of Artificial Sequence: Synthetic polypeptide
EVQLVQSGGGLVKPGGSLRLSCAASGFTFSRYSMNWVRQAPGKGLEGVSSISSSSSYIYYADSVKGRFTISRDNAKNSLYLQMNSLRAEDTAVYYCARDGPTVNWDYYFDLWGRGTLVTVSSASTKGPSVFPLAPSSKSTSGGTAALGCLVKDYFPEPVTVSWNSGALTSGVHTFPAVLQSSGLYSLSSVVTVPSSSLGTQTYICNVNHKPSNTKVDKKVEPKSCDKTHTCPPCPAPELLGGPSVFLFPPKPKDTLMISRTPEVTCVVVDVSHEDPEVKFNWYVDGVEVHNAKTKPREEQYNSTYRVVSVLTVLHQDWLNGKEYKCKVSNKALPAPIEKTISKAKGQPREPQVYTLPPSREEMTKNQVSLTCLVKGFYPSDIAVEWESNGQPENNYKTTPPVLDSDGSFFLYSKLTVDKSRWQQGNVFSCSVMHEALHNHYTQKSLSLSPGK

SEQ ID NO: 1360 - protein, 217 aa, synthetic construct
  REGION 1..217: note = Description of Artificial Sequence: Synthetic polypeptide
QSVLTQPPSVSAAPGQKVTISCSGSSSNIGNNYVSWYQQLPGTAPKLLIYDNNKRPSGIPDRFSGSKSGTSATLGITGLQTGDEADYYCGTWDSSLSTSVVFGGGTKLTVLGQPKAAPSVTLFPPSSEELQANKATLVCLISDFYPGAVTVAWKADSSPVKAGVETTTPSKQSNNKYAASSYLSLTPEQWKSHRSYSCQVTHEGSTVEKTVAPTECS

SEQ ID NO: 1361 - protein, 7 aa, synthetic construct
  REGION 1..7: note = Description of Artificial Sequence: Synthetic peptide
SNSAAWN

SEQ ID NO: 1362 - protein, 18 aa, synthetic construct
  REGION 1..18: note = Description of Artificial Sequence: Synthetic peptide
RTYYRSKWYNDYPISVKS

SEQ ID NO: 1363 - protein, 12 aa, synthetic construct
  REGION 1..12: note = Description of Artificial Sequence: Synthetic peptide
ESGSYYTDGFDI

SEQ ID NO: 1364 - protein, 11 aa, synthetic construct
  REGION 1..11: note = Description of Artificial Sequence: Synthetic peptide
RASQGISSYLA

SEQ ID NO: 1365 - protein, 7 aa, synthetic construct
  REGION 1..7: note = Description of Artificial Sequence: Synthetic peptide
AASTLQS

SEQ ID NO: 1366 - protein, 9 aa, synthetic construct
  REGION 1..9: note = Description of Artificial Sequence: Synthetic peptide
QEFNSYPYT

SEQ ID NO: 1367 - protein, 9 aa, synthetic construct
  REGION 1..9: note = Description of Artificial Sequence: Synthetic peptide
GDSVSSNSA

SEQ ID NO: 1368 - protein, 7 aa, synthetic construct
  REGION 1..7: note = Description of Artificial Sequence: Synthetic peptide
YYRSKWY

SEQ ID NO: 1369 - protein, 11 aa, synthetic construct
  REGION 1..11: note = Description of Artificial Sequence: Synthetic peptide
ESGSYYTDGFD

SEQ ID NO: 1370 - protein, 7 aa, synthetic construct
  REGION 1..7: note = Description of Artificial Sequence: Synthetic peptide
SQGISSY

SEQ ID NO: 1371 - skipped

SEQ ID NO: 1372 - protein, 6 aa, synthetic construct
  REGION 1..6: note = Description of Artificial Sequence: Synthetic peptide
FNSYPY

SEQ ID NO: 1373 - protein, 12 aa, synthetic construct
  REGION 1..12: note = Description of Artificial Sequence: Synthetic peptide
GDSVSSNSAAWN

SEQ ID NO: 1374 - protein, 11 aa, synthetic construct
  REGION 1..11: note = Description of Artificial Sequence: Synthetic peptide
RTYYRSKWYND

SEQ ID NO: 1375 - protein, 12 aa, synthetic construct
  REGION 1..12: note = Description of Artificial Sequence: Synthetic peptide
ESGSYYTDGFDI

SEQ ID NO: 1376 - protein, 11 aa, synthetic construct
  REGION 1..11: note = Description of Artificial Sequence: Synthetic peptide
RASQGISSYLA

SEQ ID NO: 1377 - protein, 7 aa, synthetic construct
  REGION 1..7: note = Description of Artificial Sequence: Synthetic peptide
AASTLQS

SEQ ID NO: 1378 - protein, 9 aa, synthetic construct
  REGION 1..9: note = Description of Artificial Sequence: Synthetic peptide
QEFNSYPYT

SEQ ID NO: 1379 - protein, 8 aa, synthetic construct
  REGION 1..8: note = Description of Artificial Sequence: Synthetic peptide
SSNSAAWN

SEQ ID NO: 1380 - protein, 14 aa, synthetic construct
  REGION 1..14: note = Description of Artificial Sequence: Synthetic peptide
WLGRTYYRSKWYND

SEQ ID NO: 1381 - protein, 13 aa, synthetic construct
  REGION 1..13: note = Description of Artificial Sequence: Synthetic peptide
ARESGSYYTDGFD

SEQ ID NO: 1382 - protein, 7 aa, synthetic construct
  REGION 1..7: note = Description of Artificial Sequence: Synthetic peptide
SSYLAWY

SEQ ID NO: 1383 - protein, 10 aa, synthetic construct
  REGION 1..10: note = Description of Artificial Sequence: Synthetic peptide
LLIYAASTLQ

SEQ ID NO: 1384 - protein, 8 aa, synthetic construct
  REGION 1..8: note = Description of Artificial Sequence: Synthetic peptide
QEFNSYPY

SEQ ID NO: 1385 - protein, 10 aa, synthetic construct
  REGION 1..10: note = Description of Artificial Sequence: Synthetic peptide
GDSVSSNSAA

SEQ ID NO: 1386 - protein, 9 aa, synthetic construct
  REGION 1..9: note = Description of Artificial Sequence: Synthetic peptide
TYYRSKWYN

SEQ ID NO: 1387 - protein, 14 aa, synthetic construct
  REGION 1..14: note = Description of Artificial Sequence: Synthetic peptide
ARESGSYYTDGFDI

SEQ ID NO: 1388 - protein, 6 aa, synthetic construct
  REGION 1..6: note = Description of Artificial Sequence: Synthetic peptide
QGISSY

SEQ ID NO: 1389 - skipped

SEQ ID NO: 1390 - protein, 9 aa, synthetic construct
  REGION 1..9: note = Description of Artificial Sequence: Synthetic peptide
QEFNSYPYT

SEQ ID NO: 1391 - protein, 124 aa, synthetic construct
  REGION 1..124: note = Description of Artificial Sequence: Synthetic polypeptide
QVQLQQSGPGLVKPSQTLSLTCAISGDSVSSNSAAWNWIRQSPSRGLEWLGRTYYRSKWYNDYPISVKSRISINPDTSKNQFSLQLNSVTPEDTAVYYCARESGSYYTDGFDIWGQGTMVTVSS

SEQ ID NO: 1392 - protein, 107 aa, synthetic construct
  REGION 1..107: note = Description of Artificial Sequence: Synthetic polypeptide
DIQMTQSPSFLSASVGDRVTITCRASQGISSYLAWYQQKPGKAPKLLIYAASTLQSGVPSRFSGSGSGTEFTLTISSLQPEDFATYYCQEFNSYPYTFGQGTKLEIK

SEQ ID NO: 1393 - protein, 454 aa, synthetic construct
  REGION 1..454: note = Description of Artificial Sequence: Synthetic polypeptide
QVQLQQSGPGLVKPSQTLSLTCAISGDSVSSNSAAWNWIRQSPSRGLEWLGRTYYRSKWYNDYPISVKSRISINPDTSKNQFSLQLNSVTPEDTAVYYCARESGSYYTDGFDIWGQGTMVTVSSASTKGPSVFPLAPSSKSTSGGTAALGCLVKDYFPEPVTVSWNSGALTSGVHTFPAVLQSSGLYSLSSVVTVPSSSLGTQTYICNVNHKPSNTKVDKKVEPKSCDKTHTCPPCPAPELLGGPSVFLFPPKPKDTLMISRTPEVTCVVVDVSHEDPEVKFNWYVDGVEVHNAKTKPREEQYNSTYRVVSVLTVLHQDWLNGKEYKCKVSNKALPAPIEKTISKAKGQPREPQVYTLPPSREEMTKNQVSLTCLVKGFYPSDIAVEWESNGQPENNYKTTPPVLDSDGSFFLYSKLTVDKSRWQQGNVFSCSVMHEALHNHYTQKSLSLSPGK

SEQ ID NO: 1394 - protein, 214 aa, synthetic construct
  REGION 1..214: note = Description of Artificial Sequence: Synthetic polypeptide
DIQMTQSPSFLSASVGDRVTITCRASQGISSYLAWYQQKPGKAPKLLIYAASTLQSGVPSRFSGSGSGTEFTLTISSLQPEDFATYYCQEFNSYPYTFGQGTKLEIKRTVAAPSVFIFPPSDEQLKSGTASVVCLLNNFYPREAKVQWKVDNALQSGNSQESVTEQDSKDSTYSLSSTLTLSKADYEKHKVYACEVTHQGLSSPVTKSFNRGEC

SEQ ID NO: 1395 - protein, 5 aa, synthetic construct
  REGION 1..5: note = Description of Artificial Sequence: Synthetic peptide
SYTMN

SEQ ID NO: 1396 - protein, 17 aa, synthetic construct
  REGION 1..17: note = Description of Artificial Sequence: Synthetic peptide
SISSSSSYIDYAESVKG

SEQ ID NO: 1397 - protein, 14 aa, synthetic construct
  REGION 1..14: note = Description of Artificial Sequence: Synthetic peptide
DGDILATIRGSFDY

SEQ ID NO: 1398 - protein, 17 aa, synthetic construct
  REGION 1..17: note = Description of Artificial Sequence: Synthetic peptide
RSSQSLLDSDAGNTYLD

SEQ ID NO: 1399 - protein, 7 aa, synthetic construct
  REGION 1..7: note = Description of Artificial Sequence: Synthetic peptide
TLSYRAS

SEQ ID NO: 1400 - protein, 9 aa, synthetic construct
  REGION 1..9: note = Description of Artificial Sequence: Synthetic peptide
MQRIEFPIT

SEQ ID NO: 1401 - protein, 7 aa, synthetic construct
  REGION 1..7: note = Description of Artificial Sequence: Synthetic peptide
GFTFSSY

SEQ ID NO: 1402 - protein, 6 aa, synthetic construct
  REGION 1..6: note = Description of Artificial Sequence: Synthetic peptide
SSSSSY

SEQ ID NO: 1403 - protein, 13 aa, synthetic construct
  REGION 1..13: note = Description of Artificial Sequence: Synthetic peptide
DGDILATIRGSFD

SEQ ID NO: 1404 - protein, 13 aa, synthetic construct
  REGION 1..13: note = Description of Artificial Sequence: Synthetic peptide
SQSLLDSDAGNTY

SEQ ID NO: 1405 - skipped

SEQ ID NO: 1406 - protein, 6 aa, synthetic construct
  REGION 1..6: note = Description of Artificial Sequence: Synthetic peptide
RIEFPI

SEQ ID NO: 1407 - protein, 10 aa, synthetic construct
  REGION 1..10: note = Description of Artificial Sequence: Synthetic peptide
GFTFSSYTMN

SEQ ID NO: 1408 - protein, 10 aa, synthetic construct
  REGION 1..10: note = Description of Artificial Sequence: Synthetic peptide
SISSSSSYID

SEQ ID NO: 1409 - protein, 14 aa, synthetic construct
  REGION 1..14: note = Description of Artificial Sequence: Synthetic peptide
DGDILATIRGSFDY

SEQ ID NO: 1410 - protein, 17 aa, synthetic construct
  REGION 1..17: note = Description of Artificial Sequence: Synthetic peptide
RSSQSLLDSDAGNTYLD

SEQ ID NO: 1411 - protein, 7 aa, synthetic construct
  REGION 1..7: note = Description of Artificial Sequence: Synthetic peptide
TLSYRAS

SEQ ID NO: 1412 - protein, 9 aa, synthetic construct
  REGION 1..9: note = Description of Artificial Sequence: Synthetic peptide
MQRIEFPIT

SEQ ID NO: 1413 - protein, 6 aa, synthetic construct
  REGION 1..6: note = Description of Artificial Sequence: Synthetic peptide
SSYTMN

SEQ ID NO: 1414 - protein, 13 aa, synthetic construct
  REGION 1..13: note = Description of Artificial Sequence: Synthetic peptide
WVSSISSSSSYID

SEQ ID NO: 1415 - protein, 15 aa, synthetic construct
  REGION 1..15: note = Description of Artificial Sequence: Synthetic peptide
ARDGDILATIRGSFD

SEQ ID NO: 1416 - protein, 13 aa, synthetic construct
  REGION 1..13: note = Description of Artificial Sequence: Synthetic peptide
LDSDAGNTYLDWY

SEQ ID NO: 1417 - protein, 10 aa, synthetic construct
  REGION 1..10: note = Description of Artificial Sequence: Synthetic peptide
LLIYTLSYRA

SEQ ID NO: 1418 - protein, 8 aa, synthetic construct
  REGION 1..8: note = Description of Artificial Sequence: Synthetic peptide
MQRIEFPI

SEQ ID NO: 1419 - protein, 8 aa, synthetic construct
  REGION 1..8: note = Description of Artificial Sequence: Synthetic peptide
GFTFSSYT

SEQ ID NO: 1420 - protein, 8 aa, synthetic construct
  REGION 1..8: note = Description of Artificial Sequence: Synthetic peptide
ISSSSSYI

SEQ ID NO: 1421 - protein, 16 aa, synthetic construct
  REGION 1..16: note = Description of Artificial Sequence: Synthetic peptide
ARDGDILATIRGSFDY

SEQ ID NO: 1422 - protein, 12 aa, synthetic construct
  REGION 1..12: note = Description of Artificial Sequence: Synthetic peptide
QSLLDSDAGNTY

SEQ ID NO: 1423 - skipped

SEQ ID NO: 1424 - protein, 9 aa, synthetic construct
  REGION 1..9: note = Description of Artificial Sequence: Synthetic peptide
MQRIEFPIT

SEQ ID NO: 1425 - protein, 123 aa, synthetic construct
  REGION 1..123: note = Description of Artificial Sequence: Synthetic polypeptide
EVQLVESGGGLVKPGGSLRLSCAASGFTFSSYTMNWVRQAPGKGLEWVSSISSSSSYIDYAESVKGRFTISRDNAKNSLYLQMNSLRAEDTAVYYCARDGDILATIRGSFDYWGQGTTVTVSS

SEQ ID NO: 1426 - protein, 113 aa, synthetic construct
  REGION 1..113: note = Description of Artificial Sequence: Synthetic polypeptide
DIVMTQTPLSLPVTPGEPASISCRSSQSLLDSDAGNTYLDWYLQKPGQSPQLLIYTLSYRASGVPDRFSGSGSGTDFTLKISRVEAEDVAIYYCMQRIEFPITFGQGTKVEIK

SEQ ID NO: 1427 - protein, 453 aa, synthetic construct
  REGION 1..453: note = Description of Artificial Sequence: Synthetic polypeptide
EVQLVESGGGLVKPGGSLRLSCAASGFTFSSYTMNWVRQAPGKGLEWVSSISSSSSYIDYAESVKGRFTISRDNAKNSLYLQMNSLRAEDTAVYYCARDGDILATIRGSFDYWGQGTTVTVSSASTKGPSVFPLAPSSKSTSGGTAALGCLVKDYFPEPVTVSWNSGALTSGVHTFPAVLQSSGLYSLSSVVTVPSSSLGTQTYICNVNHKPSNTKVDKKVEPKSCDKTHTCPPCPAPELLGGPSVFLFPPKPKDTLMISRTPEVTCVVVDVSHEDPEVKFNWYVDGVEVHNAKTKPREEQYNSTYRVVSVLTVLHQDWLNGKEYKCKVSNKALPAPIEKTISKAKGQPREPQVYTLPPSREEMTKNQVSLTCLVKGFYPSDIAVEWESNGQPENNYKTTPPVLDSDGSFFLYSKLTVDKSRWQQGNVFSCSVMHEALHNHYTQKSLSLSPGK

SEQ ID NO: 1428 - protein, 220 aa, synthetic construct
  REGION 1..220: note = Description of Artificial Sequence: Synthetic polypeptide
DIVMTQTPLSLPVTPGEPASISCRSSQSLLDSDAGNTYLDWYLQKPGQSPQLLIYTLSYRASGVPDRFSGSGSGTDFTLKISRVEAEDVAIYYCMQRIEFPITFGQGTKVEIKRTVAAPSVFIFPPSDEQLKSGTASVVCLLNNFYPREAKVQWKVDNALQSGNSQESVTEQDSKDSTYSLSSTLTLSKADYEKHKVYACEVTHQGLSSPVTKSFNRGEC

SEQ ID NO: 1429 - protein, 5 aa, synthetic construct
  REGION 1..5: note = Description of Artificial Sequence: Synthetic peptide
NYGMN

SEQ ID NO: 1430 - protein, 17 aa, synthetic construct
  REGION 1..17: note = Description of Artificial Sequence: Synthetic peptide
YISSGSSYKYYADSMKG

SEQ ID NO: 1431 - protein, 14 aa, synthetic construct
  REGION 1..14: note = Description of Artificial Sequence: Synthetic peptide
DPVVTEYYYYGMDV

SEQ ID NO: 1432 - protein, 11 aa, synthetic construct
  REGION 1..11: note = Description of Artificial Sequence: Synthetic peptide
RASQGINSWLA

SEQ ID NO: 1433 - protein, 7 aa, synthetic construct
  REGION 1..7: note = Description of Artificial Sequence: Synthetic peptide
AASSLQS

SEQ ID NO: 1434 - protein, 9 aa, synthetic construct
  REGION 1..9: note = Description of Artificial Sequence: Synthetic peptide
QQANSFPWT

SEQ ID NO: 1435 - protein, 7 aa, synthetic construct
  REGION 1..7: note = Description of Artificial Sequence: Synthetic peptide
GFTFSNY

SEQ ID NO: 1436 - protein, 6 aa, synthetic construct
  REGION 1..6: note = Description of Artificial Sequence: Synthetic peptide
SSGSSY

SEQ ID NO: 1437 - protein, 13 aa, synthetic construct
  REGION 1..13: note = Description of Artificial Sequence: Synthetic peptide
DPVVTEYYYYGMD

SEQ ID NO: 1438 - protein, 7 aa, synthetic construct
  REGION 1..7: note = Description of Artificial Sequence: Synthetic peptide
SQGINSW

SEQ ID NO: 1439 - skipped

SEQ ID NO: 1440 - protein, 6 aa, synthetic construct
  REGION 1..6: note = Description of Artificial Sequence: Synthetic peptide
ANSFPW

SEQ ID NO: 1441 - protein, 10 aa, synthetic construct
  REGION 1..10: note = Description of Artificial Sequence: Synthetic peptide
GFTFSNYGMN

SEQ ID NO: 1442 - protein, 10 aa, synthetic construct
  REGION 1..10: note = Description of Artificial Sequence: Synthetic peptide
YISSGSSYKY

SEQ ID NO: 1443 - protein, 14 aa, synthetic construct
  REGION 1..14: note = Description of Artificial Sequence: Synthetic peptide
DPVVTEYYYYGMDV

SEQ ID NO: 1444 - protein, 11 aa, synthetic construct
  REGION 1..11: note = Description of Artificial Sequence: Synthetic peptide
RASQGINSWLA

SEQ ID NO: 1445 - protein, 7 aa, synthetic construct
  REGION 1..7: note = Description of Artificial Sequence: Synthetic peptide
AASSLQS

SEQ ID NO: 1446 - protein, 9 aa, synthetic construct
  REGION 1..9: note = Description of Artificial Sequence: Synthetic peptide
QQANSFPWT

SEQ ID NO: 1447 - protein, 6 aa, synthetic construct
  REGION 1..6: note = Description of Artificial Sequence: Synthetic peptide
SNYGMN

SEQ ID NO: 1448 - protein, 13 aa, synthetic construct
  REGION 1..13: note = Description of Artificial Sequence: Synthetic peptide
WVSYISSGSSYKY

SEQ ID NO: 1449 - protein, 15 aa, synthetic construct
  REGION 1..15: note = Description of Artificial Sequence: Synthetic peptide
ARDPVVTEYYYYGMD

SEQ ID NO: 1450 - protein, 7 aa, synthetic construct
  REGION 1..7: note = Description of Artificial Sequence: Synthetic peptide
NSWLAWY

SEQ ID NO: 1451 - protein, 10 aa, synthetic construct
  REGION 1..10: note = Description of Artificial Sequence: Synthetic peptide
LLIYAASSLQ

SEQ ID NO: 1452 - protein, 8 aa, synthetic construct
  REGION 1..8: note = Description of Artificial Sequence: Synthetic peptide
QQANSFPW

SEQ ID NO: 1453 - protein, 8 aa, synthetic construct
  REGION 1..8: note = Description of Artificial Sequence: Synthetic peptide
GFTFSNYG

SEQ ID NO: 1454 - protein, 8 aa, synthetic construct
  REGION 1..8: note = Description of Artificial Sequence: Synthetic peptide
ISSGSSYK

SEQ ID NO: 1455 - protein, 16 aa, synthetic construct
  REGION 1..16: note = Description of Artificial Sequence: Synthetic peptide
ARDPVVTEYYYYGMDV

SEQ ID NO: 1456 - protein, 6 aa, synthetic construct
  REGION 1..6: note = Description of Artificial Sequence: Synthetic peptide
QGINSW

SEQ ID NO: 1457 - skipped

SEQ ID NO: 1458 - protein, 9 aa, synthetic construct
  REGION 1..9: note = Description of Artificial Sequence: Synthetic peptide
QQANSFPWT

SEQ ID NO: 1459 - protein, 123 aa, synthetic construct
  REGION 1..123: note = Description of Artificial Sequence: Synthetic polypeptide
EVQLVQSGGGLVKPGGSLRLSCAASGFTFSNYGMNWVRQAPGKGLEWVSYISSGSSYKYYADSMKGRFTISRDNAMNLLYLQMNSLRPEDSAMYYCARDPVVTEYYYYGMDVWGQGTMVTVSS

SEQ ID NO: 1460 - protein, 107 aa, synthetic construct
  REGION 1..107: note = Description of Artificial Sequence: Synthetic polypeptide
DIQMTQSPSSVSASVGDRVTITCRASQGINSWLAWYQQKPGNAPKLLIYAASSLQSGVPSRFSGIGSGTDFIFTISSLQPEDFASYYCQQANSFPWTFGQGTKVDIK

SEQ ID NO: 1461 - protein, 453 aa, synthetic construct
  REGION 1..453: note = Description of Artificial Sequence: Synthetic polypeptide
EVQLVQSGGGLVKPGGSLRLSCAASGFTFSNYGMNWVRQAPGKGLEWVSYISSGSSYKYYADSMKGRFTISRDNAMNLLYLQMNSLRPEDSAMYYCARDPVVTEYYYYGMDVWGQGTMVTVSSASTKGPSVFPLAPSSKSTSGGTAALGCLVKDYFPEPVTVSWNSGALTSGVHTFPAVLQSSGLYSLSSVVTVPSSSLGTQTYICNVNHKPSNTKVDKKVEPKSCDKTHTCPPCPAPELLGGPSVFLFPPKPKDTLMISRTPEVTCVVVDVSHEDPEVKFNWYVDGVEVHNAKTKPREEQYNSTYRVVSVLTVLHQDWLNGKEYKCKVSNKALPAPIEKTISKAKGQPREPQVYTLPPSREEMTKNQVSLTCLVKGFYPSDIAVEWESNGQPENNYKTTPPVLDSDGSFFLYSKLTVDKSRWQQGNVFSCSVMHEALHNHYTQKSLSLSPGK

SEQ ID NO: 1462 - protein, 214 aa, synthetic construct
  REGION 1..214: note = Description of Artificial Sequence: Synthetic polypeptide
DIQMTQSPSSVSASVGDRVTITCRASQGINSWLAWYQQKPGNAPKLLIYAASSLQSGVPSRFSGIGSGTDFIFTISSLQPEDFASYYCQQANSFPWTFGQGTKVDIKRTVAAPSVFIFPPSDEQLKSGTASVVCLLNNFYPREAKVQWKVDNALQSGNSQESVTEQDSKDSTYSLSSTLTLSKADYEKHKVYACEVTHQGLSSPVTKSFNRGEC

SEQ ID NO: 1463 - protein, 5 aa, synthetic construct
  REGION 1..5: note = Description of Artificial Sequence: Synthetic peptide
AYTMN

SEQ ID NO: 1464 - protein, 17 aa, synthetic construct
  REGION 1..17: note = Description of Artificial Sequence: Synthetic peptide
SISSSSSYIDFAESVKG

SEQ ID NO: 1465 - protein, 14 aa, synthetic construct
  REGION 1..14: note = Description of Artificial Sequence: Synthetic peptide
DGDIVSTIRGSFDY

SEQ ID NO: 1466 - protein, 17 aa, synthetic construct
  REGION 1..17: note = Description of Artificial Sequence: Synthetic peptide
RSSQSLLDSDDGNTYLD

SEQ ID NO: 1467 - protein, 7 aa, synthetic construct
  REGION 1..7: note = Description of Artificial Sequence: Synthetic peptide
TLSYRAS

SEQ ID NO: 1468 - protein, 9 aa, synthetic construct
  REGION 1..9: note = Description of Artificial Sequence: Synthetic peptide
MQRIEFPIT

SEQ ID NO: 1469 - protein, 7 aa, synthetic construct
  REGION 1..7: note = Description of Artificial Sequence: Synthetic peptide
GFTFGAY

SEQ ID NO: 1470 - protein, 6 aa, synthetic construct
  REGION 1..6: note = Description of Artificial Sequence: Synthetic peptide
SSSSSY

SEQ ID NO: 1471 - protein, 13 aa, synthetic construct
  REGION 1..13: note = Description of Artificial Sequence: Synthetic peptide
DGDIVSTIRGSFD

SEQ ID NO: 1472 - protein, 13 aa, synthetic construct
  REGION 1..13: note = Description of Artificial Sequence: Synthetic peptide
SQSLLDSDDGNTY

SEQ ID NO: 1473 - skipped

SEQ ID NO: 1474 - protein, 6 aa, synthetic construct
  REGION 1..6: note = Description of Artificial Sequence: Synthetic peptide
RIEFPI

SEQ ID NO: 1475 - protein, 10 aa, synthetic construct
  REGION 1..10: note = Description of Artificial Sequence: Synthetic peptide
GFTFGAYTMN

SEQ ID NO: 1476 - protein, 10 aa, synthetic construct
  REGION 1..10: note = Description of Artificial Sequence: Synthetic peptide
SISSSSSYID

SEQ ID NO: 1477 - protein, 14 aa, synthetic construct
  REGION 1..14: note = Description of Artificial Sequence: Synthetic peptide
DGDIVSTIRGSFDY

SEQ ID NO: 1478 - protein, 17 aa, synthetic construct
  REGION 1..17: note = Description of Artificial Sequence: Synthetic peptide
RSSQSLLDSDDGNTYLD

SEQ ID NO: 1479 - protein, 7 aa, synthetic construct
  REGION 1..7: note = Description of Artificial Sequence: Synthetic peptide
TLSYRAS

SEQ ID NO: 1480 - protein, 9 aa, synthetic construct
  REGION 1..9: note = Description of Artificial Sequence: Synthetic peptide
MQRIEFPIT

SEQ ID NO: 1481 - protein, 6 aa, synthetic construct
  REGION 1..6: note = Description of Artificial Sequence: Synthetic peptide
GAYTMN

SEQ ID NO: 1482 - protein, 13 aa, synthetic construct
  REGION 1..13: note = Description of Artificial Sequence: Synthetic peptide
WVSSISSSSSYID

SEQ ID NO: 1483 - protein, 15 aa, synthetic construct
  REGION 1..15: note = Description of Artificial Sequence: Synthetic peptide
ARDGDIVSTIRGSFD

SEQ ID NO: 1484 - protein, 13 aa, synthetic construct
  REGION 1..13: note = Description of Artificial Sequence: Synthetic peptide
LDSDDGNTYLDWY

SEQ ID NO: 1485 - protein, 10 aa, synthetic construct
  REGION 1..10: note = Description of Artificial Sequence: Synthetic peptide
LLIYTLSYRA

SEQ ID NO: 1486 - protein, 8 aa, synthetic construct
  REGION 1..8: note = Description of Artificial Sequence: Synthetic peptide
MQRIEFPI

SEQ ID NO: 1487 - protein, 8 aa, synthetic construct
  REGION 1..8: note = Description of Artificial Sequence: Synthetic peptide
GFTFGAYT

SEQ ID NO: 1488 - protein, 8 aa, synthetic construct
  REGION 1..8: note = Description of Artificial Sequence: Synthetic peptide
ISSSSSYI

SEQ ID NO: 1489 - protein, 16 aa, synthetic construct
  REGION 1..16: note = Description of Artificial Sequence: Synthetic peptide
ARDGDIVSTIRGSFDY

SEQ ID NO: 1490 - protein, 12 aa, synthetic construct
  REGION 1..12: note = Description of Artificial Sequence: Synthetic peptide
QSLLDSDDGNTY

SEQ ID NO: 1491 - skipped

SEQ ID NO: 1492 - protein, 9 aa, synthetic construct
  REGION 1..9: note = Description of Artificial Sequence: Synthetic peptide
MQRIEFPIT

SEQ ID NO: 1493 - protein, 123 aa, synthetic construct
  REGION 1..123: note = Description of Artificial Sequence: Synthetic polypeptide
QVQLVESGGGLVKPGGSLRLSCTASGFTFGAYTMNWVRQAPGKGLEWVSSISSSSSYIDFAESVKGRFTISRDNAKNSLYLQMISLRAEDTAVYYCARDGDIVSTIRGSFDYWGQGALVTVSS

SEQ ID NO: 1494 - protein, 113 aa, synthetic construct
  REGION 1..113: note = Description of Artificial Sequence: Synthetic polypeptide
EIVMTQSPLSLPVTPGEPASISCRSSQSLLDSDDGNTYLDWYLQKPGQSPQLLIYTLSYRASGVPDRFSGSGSGTDFTLKISRVEAEDVGIYYCMQRIEFPITFGQGTKVEIK

SEQ ID NO: 1495 - protein, 453 aa, synthetic construct
  REGION 1..453: note = Description of Artificial Sequence: Synthetic polypeptide
QVQLVESGGGLVKPGGSLRLSCTASGFTFGAYTMNWVRQAPGKGLEWVSSISSSSSYIDFAESVKGRFTISRDNAKNSLYLQMISLRAEDTAVYYCARDGDIVSTIRGSFDYWGQGALVTVSSASTKGPSVFPLAPSSKSTSGGTAALGCLVKDYFPEPVTVSWNSGALTSGVHTFPAVLQSSGLYSLSSVVTVPSSSLGTQTYICNVNHKPSNTKVDKKVEPKSCDKTHTCPPCPAPELLGGPSVFLFPPKPKDTLMISRTPEVTCVVVDVSHEDPEVKFNWYVDGVEVHNAKTKPREEQYNSTYRVVSVLTVLHQDWLNGKEYKCKVSNKALPAPIEKTISKAKGQPREPQVYTLPPSREEMTKNQVSLTCLVKGFYPSDIAVEWESNGQPENNYKTTPPVLDSDGSFFLYSKLTVDKSRWQQGNVFSCSVMHEALHNHYTQKSLSLSPGK

SEQ ID NO: 1496 - protein, 220 aa, synthetic construct
  REGION 1..220: note = Description of Artificial Sequence: Synthetic polypeptide
EIVMTQSPLSLPVTPGEPASISCRSSQSLLDSDDGNTYLDWYLQKPGQSPQLLIYTLSYRASGVPDRFSGSGSGTDFTLKISRVEAEDVGIYYCMQRIEFPITFGQGTKVEIKRTVAAPSVFIFPPSDEQLKSGTASVVCLLNNFYPREAKVQWKVDNALQSGNSQESVTEQDSKDSTYSLSSTLTLSKADYEKHKVYACEVTHQGLSSPVTKSFNRGEC

SEQ ID NO: 1497 - protein, 5 aa, synthetic construct
  REGION 1..5: note = Description of Artificial Sequence: Synthetic peptide
SYSMD

SEQ ID NO: 1498 - protein, 17 aa, synthetic construct
  REGION 1..17: note = Description of Artificial Sequence: Synthetic peptide
SIGSSSSYIFYADSVKG

SEQ ID NO: 1499 - protein, 12 aa, synthetic construct
  REGION 1..12: note = Description of Artificial Sequence: Synthetic peptide
SYSWNYGGAFDI

SEQ ID NO: 1500 - protein, 12 aa, synthetic construct
  REGION 1..12: note = Description of Artificial Sequence: Synthetic peptide
RASQSVSSSYLA

SEQ ID NO: 1501 - protein, 7 aa, synthetic construct
  REGION 1..7: note = Description of Artificial Sequence: Synthetic peptide
GASSRAT

SEQ ID NO: 1502 - protein, 10 aa, synthetic construct
  REGION 1..10: note = Description of Artificial Sequence: Synthetic peptide
QQYGSSPPYT

SEQ ID NO: 1503 - protein, 7 aa, synthetic construct
  REGION 1..7: note = Description of Artificial Sequence: Synthetic peptide
GITFSSY

SEQ ID NO: 1504 - protein, 6 aa, synthetic construct
  REGION 1..6: note = Description of Artificial Sequence: Synthetic peptide
GSSSSY

SEQ ID NO: 1505 - protein, 11 aa, synthetic construct
  REGION 1..11: note = Description of Artificial Sequence: Synthetic peptide
SYSWNYGGAFD

SEQ ID NO: 1506 - protein, 8 aa, synthetic construct
  REGION 1..8: note = Description of Artificial Sequence: Synthetic peptide
SQSVSSSY

SEQ ID NO: 1507 - skipped

SEQ ID NO: 1508 - protein, 7 aa, synthetic construct
  REGION 1..7: note = Description of Artificial Sequence: Synthetic peptide
YGSSPPY

SEQ ID NO: 1509 - protein, 10 aa, synthetic construct
  REGION 1..10: note = Description of Artificial Sequence: Synthetic peptide
GITFSSYSMD

SEQ ID NO: 1510 - protein, 10 aa, synthetic construct
  REGION 1..10: note = Description of Artificial Sequence: Synthetic peptide
SIGSSSSYIF

SEQ ID NO: 1511 - protein, 12 aa, synthetic construct
  REGION 1..12: note = Description of Artificial Sequence: Synthetic peptide
SYSWNYGGAFDI

SEQ ID NO: 1512 - protein, 12 aa, synthetic construct
  REGION 1..12: note = Description of Artificial Sequence: Synthetic peptide
RASQSVSSSYLA

SEQ ID NO: 1513 - protein, 7 aa, synthetic construct
  REGION 1..7: note = Description of Artificial Sequence: Synthetic peptide
GASSRAT

SEQ ID NO: 1514 - protein, 10 aa, synthetic construct
  REGION 1..10: note = Description of Artificial Sequence: Synthetic peptide
QQYGSSPPYT

SEQ ID NO: 1515 - protein, 6 aa, synthetic construct
  REGION 1..6: note = Description of Artificial Sequence: Synthetic peptide
SSYSMD

SEQ ID NO: 1516 - protein, 13 aa, synthetic construct
  REGION 1..13: note = Description of Artificial Sequence: Synthetic peptide
WVSSIGSSSSYIF

SEQ ID NO: 1517 - protein, 13 aa, synthetic construct
  REGION 1..13: note = Description of Artificial Sequence: Synthetic peptide
ATSYSWNYGGAFD

SEQ ID NO: 1518 - protein, 8 aa, synthetic construct
  REGION 1..8: note = Description of Artificial Sequence: Synthetic peptide
SSSYLAWY

SEQ ID NO: 1519 - protein, 10 aa, synthetic construct
  REGION 1..10: note = Description of Artificial Sequence: Synthetic peptide
LLIYGASSRA

SEQ ID NO: 1520 - protein, 9 aa, synthetic construct
  REGION 1..9: note = Description of Artificial Sequence: Synthetic peptide
QQYGSSPPY

SEQ ID NO: 1521 - protein, 8 aa, synthetic construct
  REGION 1..8: note = Description of Artificial Sequence: Synthetic peptide
GITFSSYS

SEQ ID NO: 1522 - protein, 8 aa, synthetic construct
  REGION 1..8: note = Description of Artificial Sequence: Synthetic peptide
IGSSSSYI

SEQ ID NO: 1523 - protein, 14 aa, synthetic construct
  REGION 1..14: note = Description of Artificial Sequence: Synthetic peptide
ATSYSWNYGGAFDI

SEQ ID NO: 1524 - protein, 7 aa, synthetic construct
  REGION 1..7: note = Description of Artificial Sequence: Synthetic peptide
QSVSSSY

SEQ ID NO: 1525 - skipped

SEQ ID NO: 1526 - protein, 10 aa, synthetic construct
  REGION 1..10: note = Description of Artificial Sequence: Synthetic peptide
QQYGSSPPYT

SEQ ID NO: 1527 - protein, 121 aa, synthetic construct
  REGION 1..121: note = Description of Artificial Sequence: Synthetic polypeptide
EVQLVESGGGLVKPGGSLRLSCAAFGITFSSYSMDWVRQAPGRGLEWVSSIGSSSSYIFYADSVKGRFTISRDNAKNSLYLQMNSLRAEDTAVYYCATSYSWNYGGAFDIWGQGTMVTVSS

SEQ ID NO: 1528 - protein, 109 aa, synthetic construct
  REGION 1..109: note = Description of Artificial Sequence: Synthetic polypeptide
EIVMTQSPGTLSLSPGERATLSCRASQSVSSSYLAWYQQKPGQAPRLLIYGASSRATGIPDRFSGSGSGTDFTLTISRLEPEDFAVYFCQQYGSSPPYTFGQGTKVEIK

SEQ ID NO: 1529 - protein, 451 aa, synthetic construct
  REGION 1..451: note = Description of Artificial Sequence: Synthetic polypeptide
EVQLVESGGGLVKPGGSLRLSCAAFGITFSSYSMDWVRQAPGRGLEWVSSIGSSSSYIFYADSVKGRFTISRDNAKNSLYLQMNSLRAEDTAVYYCATSYSWNYGGAFDIWGQGTMVTVSSASTKGPSVFPLAPSSKSTSGGTAALGCLVKDYFPEPVTVSWNSGALTSGVHTFPAVLQSSGLYSLSSVVTVPSSSLGTQTYICNVNHKPSNTKVDKKVEPKSCDKTHTCPPCPAPELLGGPSVFLFPPKPKDTLMISRTPEVTCVVVDVSHEDPEVKFNWYVDGVEVHNAKTKPREEQYNSTYRVVSVLTVLHQDWLNGKEYKCKVSNKALPAPIEKTISKAKGQPREPQVYTLPPSREEMTKNQVSLTCLVKGFYPSDIAVEWESNGQPENNYKTTPPVLDSDGSFFLYSKLTVDKSRWQQGNVFSCSVMHEALHNHYTQKSLSLSPGK

SEQ ID NO: 1530 - protein, 216 aa, synthetic construct
  REGION 1..216: note = Description of Artificial Sequence: Synthetic polypeptide
EIVMTQSPGTLSLSPGERATLSCRASQSVSSSYLAWYQQKPGQAPRLLIYGASSRATGIPDRFSGSGSGTDFTLTISRLEPEDFAVYFCQQYGSSPPYTFGQGTKVEIKRTVAAPSVFIFPPSDEQLKSGTASVVCLLNNFYPREAKVQWKVDNALQSGNSQESVTEQDSKDSTYSLSSTLTLSKADYEKHKVYACEVTHQGLSSPVTKSFNRGEC

SEQ ID NO: 1531 - protein, 5 aa, synthetic construct
  REGION 1..5: note = Description of Artificial Sequence: Synthetic peptide
SYNMN

SEQ ID NO: 1532 - protein, 17 aa, synthetic construct
  REGION 1..17: note = Description of Artificial Sequence: Synthetic peptide
SISTSSSYIYYADSVKG

SEQ ID NO: 1533 - protein, 13 aa, synthetic construct
  REGION 1..13: note = Description of Artificial Sequence: Synthetic peptide
DTSVTKYPDTFDI

SEQ ID NO: 1534 - protein, 11 aa, synthetic construct
  REGION 1..11: note = Description of Artificial Sequence: Synthetic peptide
RASQDINNYLA

SEQ ID NO: 1535 - protein, 7 aa, synthetic construct
  REGION 1..7: note = Description of Artificial Sequence: Synthetic peptide
GASTLQS

SEQ ID NO: 1536 - protein, 9 aa, synthetic construct
  REGION 1..9: note = Description of Artificial Sequence: Synthetic peptide
QKYNSAPFT

SEQ ID NO: 1537 - protein, 7 aa, synthetic construct
  REGION 1..7: note = Description of Artificial Sequence: Synthetic peptide
GFTFSSY

SEQ ID NO: 1538 - protein, 6 aa, synthetic construct
  REGION 1..6: note = Description of Artificial Sequence: Synthetic peptide
STSSSY

SEQ ID NO: 1539 - protein, 12 aa, synthetic construct
  REGION 1..12: note = Description of Artificial Sequence: Synthetic peptide
DTSVTKYPDTFD

SEQ ID NO: 1540 - protein, 7 aa, synthetic construct
  REGION 1..7: note = Description of Artificial Sequence: Synthetic peptide
SQDINNY

SEQ ID NO: 1541 - skipped

SEQ ID NO: 1542 - protein, 6 aa, synthetic construct
  REGION 1..6: note = Description of Artificial Sequence: Synthetic peptide
YNSAPF

SEQ ID NO: 1543 - protein, 10 aa, synthetic construct
  REGION 1..10: note = Description of Artificial Sequence: Synthetic peptide
GFTFSSYNMN

SEQ ID NO: 1544 - protein, 10 aa, synthetic construct
  REGION 1..10: note = Description of Artificial Sequence: Synthetic peptide
SISTSSSYIY

SEQ ID NO: 1545 - protein, 13 aa, synthetic construct
  REGION 1..13: note = Description of Artificial Sequence: Synthetic peptide
DTSVTKYPDTFDI

SEQ ID NO: 1546 - protein, 11 aa, synthetic construct
  REGION 1..11: note = Description of Artificial Sequence: Synthetic peptide
RASQDINNYLA

SEQ ID NO: 1547 - protein, 7 aa, synthetic construct
  REGION 1..7: note = Description of Artificial Sequence: Synthetic peptide
GASTLQS

SEQ ID NO: 1548 - protein, 9 aa, synthetic construct
  REGION 1..9: note = Description of Artificial Sequence: Synthetic peptide
QKYNSAPFT

SEQ ID NO: 1549 - protein, 6 aa, synthetic construct
  REGION 1..6: note = Description of Artificial Sequence: Synthetic peptide
SSYNMN

SEQ ID NO: 1550 - protein, 13 aa, synthetic construct
  REGION 1..13: note = Description of Artificial Sequence: Synthetic peptide
WVSSISTSSSYIY

SEQ ID NO: 1551 - protein, 14 aa, synthetic construct
  REGION 1..14: note = Description of Artificial Sequence: Synthetic peptide
ARDTSVTKYPDTFD

SEQ ID NO: 1552 - protein, 7 aa, synthetic construct
  REGION 1..7: note = Description of Artificial Sequence: Synthetic peptide
NNYLAWF

SEQ ID NO: 1553 - protein, 10 aa, synthetic construct
  REGION 1..10: note = Description of Artificial Sequence: Synthetic peptide
LLIYGASTLQ

SEQ ID NO: 1554 - protein, 8 aa, synthetic construct
  REGION 1..8: note = Description of Artificial Sequence: Synthetic peptide
QKYNSAPF

SEQ ID NO: 1555 - protein, 8 aa, synthetic construct
  REGION 1..8: note = Description of Artificial Sequence: Synthetic peptide
GFTFSSYN

SEQ ID NO: 1556 - protein, 8 aa, synthetic construct
  REGION 1..8: note = Description of Artificial Sequence: Synthetic peptide
ISTSSSYI

SEQ ID NO: 1557 - protein, 15 aa, synthetic construct
  REGION 1..15: note = Description of Artificial Sequence: Synthetic peptide
ARDTSVTKYPDTFDI

SEQ ID NO: 1558 - protein, 6 aa, synthetic construct
  REGION 1..6: note = Description of Artificial Sequence: Synthetic peptide
QDINNY

SEQ ID NO: 1559 - skipped

SEQ ID NO: 1560 - protein, 9 aa, synthetic construct
  REGION 1..9: note = Description of Artificial Sequence: Synthetic peptide
QKYNSAPFT

SEQ ID NO: 1561 - protein, 122 aa, synthetic construct
  REGION 1..122: note = Description of Artificial Sequence: Synthetic polypeptide
EVQLVESGGGLVKPGGSLRLSCAASGFTFSSYNMNWVRQAPGKGLEWVSSISTSSSYIYYADSVKGRFTISRDNAKNSLYLQMNGLRAEDTAVYYCARDTSVTKYPDTFDIWGQGTMVTVSS

SEQ ID NO: 1562 - protein, 107 aa, synthetic construct
  REGION 1..107: note = Description of Artificial Sequence: Synthetic polypeptide
DIVMTQSPSSLSASVGDRVTITCRASQDINNYLAWFQQKPGKVPNLLIYGASTLQSGVPSRFTGSGSGTDFTLTISSLQPEDVATYYCQKYNSAPFTFGPGTKVDIK

SEQ ID NO: 1563 - protein, 452 aa, synthetic construct
  REGION 1..452: note = Description of Artificial Sequence: Synthetic polypeptide
EVQLVESGGGLVKPGGSLRLSCAASGFTFSSYNMNWVRQAPGKGLEWVSSISTSSSYIYYADSVKGRFTISRDNAKNSLYLQMNGLRAEDTAVYYCARDTSVTKYPDTFDIWGQGTMVTVSSASTKGPSVFPLAPSSKSTSGGTAALGCLVKDYFPEPVTVSWNSGALTSGVHTFPAVLQSSGLYSLSSVVTVPSSSLGTQTYICNVNHKPSNTKVDKKVEPKSCDKTHTCPPCPAPELLGGPSVFLFPPKPKDTLMISRTPEVTCVVVDVSHEDPEVKFNWYVDGVEVHNAKTKPREEQYNSTYRVVSVLTVLHQDWLNGKEYKCKVSNKALPAPIEKTISKAKGQPREPQVYTLPPSREEMTKNQVSLTCLVKGFYPSDIAVEWESNGQPENNYKTTPPVLDSDGSFFLYSKLTVDKSRWQQGNVFSCSVMHEALHNHYTQKSLSLSPGK

SEQ ID NO: 1564 - protein, 214 aa, synthetic construct
  REGION 1..214: note = Description of Artificial Sequence: Synthetic polypeptide
DIVMTQSPSSLSASVGDRVTITCRASQDINNYLAWFQQKPGKVPNLLIYGASTLQSGVPSRFTGSGSGTDFTLTISSLQPEDVATYYCQKYNSAPFTFGPGTKVDIKRTVAAPSVFIFPPSDEQLKSGTASVVCLLNNFYPREAKVQWKVDNALQSGNSQESVTEQDSKDSTYSLSSTLTLSKADYEKHKVYACEVTHQGLSSPVTKSFNRGEC

SEQ ID NO: 1565 - protein, 5 aa, synthetic construct
  REGION 1..5: note = Description of Artificial Sequence: Synthetic peptide
GDYMH

SEQ ID NO: 1566 - protein, 17 aa, synthetic construct
  REGION 1..17: note = Description of Artificial Sequence: Synthetic peptide
WINPNSGYTNYAQKFQG

SEQ ID NO: 1567 - protein, 7 aa, synthetic construct
  REGION 1..7: note = Description of Artificial Sequence: Synthetic peptide
EGDAFDV

SEQ ID NO: 1568 - protein, 14 aa, synthetic construct
  REGION 1..14: note = Description of Artificial Sequence: Synthetic peptide
TGTSSDVGGYNYVS

SEQ ID NO: 1569 - protein, 7 aa, synthetic construct
  REGION 1..7: note = Description of Artificial Sequence: Synthetic peptide
EVSKRPS

SEQ ID NO: 1570 - protein, 11 aa, synthetic construct
  REGION 1..11: note = Description of Artificial Sequence: Synthetic peptide
NSYAGSNNFEV

SEQ ID NO: 1571 - protein, 7 aa, synthetic construct
  REGION 1..7: note = Description of Artificial Sequence: Synthetic peptide
GYTFTGD

SEQ ID NO: 1572 - protein, 6 aa, synthetic construct
  REGION 1..6: note = Description of Artificial Sequence: Synthetic peptide
NPNSGY

SEQ ID NO: 1573 - protein, 6 aa, synthetic construct
  REGION 1..6: note = Description of Artificial Sequence: Synthetic peptide
EGDAFD

SEQ ID NO: 1574 - protein, 10 aa, synthetic construct
  REGION 1..10: note = Description of Artificial Sequence: Synthetic peptide
TSSDVGGYNY

SEQ ID NO: 1575 - skipped

SEQ ID NO: 1576 - protein, 8 aa, synthetic construct
  REGION 1..8: note = Description of Artificial Sequence: Synthetic peptide
YAGSNNFE

SEQ ID NO: 1577 - protein, 10 aa, synthetic construct
  REGION 1..10: note = Description of Artificial Sequence: Synthetic peptide
GYTFTGDYMH

SEQ ID NO: 1578 - protein, 10 aa, synthetic construct
  REGION 1..10: note = Description of Artificial Sequence: Synthetic peptide
WINPNSGYTN

SEQ ID NO: 1579 - protein, 7 aa, synthetic construct
  REGION 1..7: note = Description of Artificial Sequence: Synthetic peptide
EGDAFDV

SEQ ID NO: 1580 - protein, 14 aa, synthetic construct
  REGION 1..14: note = Description of Artificial Sequence: Synthetic peptide
TGTSSDVGGYNYVS

SEQ ID NO: 1581 - protein, 7 aa, synthetic construct
  REGION 1..7: note = Description of Artificial Sequence: Synthetic peptide
EVSKRPS

SEQ ID NO: 1582 - protein, 11 aa, synthetic construct
  REGION 1..11: note = Description of Artificial Sequence: Synthetic peptide
NSYAGSNNFEV

SEQ ID NO: 1583 - protein, 6 aa, synthetic construct
  REGION 1..6: note = Description of Artificial Sequence: Synthetic peptide
TGDYMH

SEQ ID NO: 1584 - protein, 13 aa, synthetic construct
  REGION 1..13: note = Description of Artificial Sequence: Synthetic peptide
WMGWINPNSGYTN

SEQ ID NO: 1585 - protein, 8 aa, synthetic construct
  REGION 1..8: note = Description of Artificial Sequence: Synthetic peptide
AREGDAFD

SEQ ID NO: 1586 - protein, 10 aa, synthetic construct
  REGION 1..10: note = Description of Artificial Sequence: Synthetic peptide
VGGYNYVSWY

SEQ ID NO: 1587 - protein, 10 aa, synthetic construct
  REGION 1..10: note = Description of Artificial Sequence: Synthetic peptide
LMIYEVSKRP

SEQ ID NO: 1588 - protein, 10 aa, synthetic construct
  REGION 1..10: note = Description of Artificial Sequence: Synthetic peptide
NSYAGSNNFE

SEQ ID NO: 1589 - protein, 8 aa, synthetic construct
  REGION 1..8: note = Description of Artificial Sequence: Synthetic peptide
GYTFTGDY

SEQ ID NO: 1590 - protein, 8 aa, synthetic construct
  REGION 1..8: note = Description of Artificial Sequence: Synthetic peptide
INPNSGYT

SEQ ID NO: 1591 - protein, 9 aa, synthetic construct
  REGION 1..9: note = Description of Artificial Sequence: Synthetic peptide
AREGDAFDV

SEQ ID NO: 1592 - protein, 9 aa, synthetic construct
  REGION 1..9: note = Description of Artificial Sequence: Synthetic peptide
SSDVGGYNY

SEQ ID NO: 1593 - skipped

SEQ ID NO: 1594 - protein, 11 aa, synthetic construct
  REGION 1..11: note = Description of Artificial Sequence: Synthetic peptide
NSYAGSNNFEV

SEQ ID NO: 1595 - protein, 116 aa, synthetic construct
  REGION 1..116: note = Description of Artificial Sequence: Synthetic polypeptide
QVQLVESGAEVTKPGASVKVSCKASGYTFTGDYMHWVRQAPGQGLEWMGWINPNSGYTNYAQKFQGRVTMTRDTSISTAYMELSRLRSDDTAVYYCAREGDAFDVWGQGTMVTVSS

SEQ ID NO: 1596 - protein, 111 aa, synthetic construct
  REGION 1..111: note = Description of Artificial Sequence: Synthetic polypeptide
QLVLTQSSSASGSPGQSVTISCTGTSSDVGGYNYVSWYQQHPGKAPKLMIYEVSKRPSGVPDRFSGSKSGNTASLTVSGLQAEDEADYYCNSYAGSNNFEVFGGGTKLTVL

SEQ ID NO: 1597 - protein, 446 aa, synthetic construct
  REGION 1..446: note = Description of Artificial Sequence: Synthetic polypeptide
QVQLVESGAEVTKPGASVKVSCKASGYTFTGDYMHWVRQAPGQGLEWMGWINPNSGYTNYAQKFQGRVTMTRDTSISTAYMELSRLRSDDTAVYYCAREGDAFDVWGQGTMVTVSSASTKGPSVFPLAPSSKSTSGGTAALGCLVKDYFPEPVTVSWNSGALTSGVHTFPAVLQSSGLYSLSSVVTVPSSSLGTQTYICNVNHKPSNTKVDKKVEPKSCDKTHTCPPCPAPELLGGPSVFLFPPKPKDTLMISRTPEVTCVVVDVSHEDPEVKFNWYVDGVEVHNAKTKPREEQYNSTYRVVSVLTVLHQDWLNGKEYKCKVSNKALPAPIEKTISKAKGQPREPQVYTLPPSREEMTKNQVSLTCLVKGFYPSDIAVEWESNGQPENNYKTTPPVLDSDGSFFLYSKLTVDKSRWQQGNVFSCSVMHEALHNHYTQKSLSLSPGK

SEQ ID NO: 1598 - protein, 217 aa, synthetic construct
  REGION 1..217: note = Description of Artificial Sequence: Synthetic polypeptide
QLVLTQSSSASGSPGQSVTISCTGTSSDVGGYNYVSWYQQHPGKAPKLMIYEVSKRPSGVPDRFSGSKSGNTASLTVSGLQAEDEADYYCNSYAGSNNFEVFGGGTKLTVLGQPKAAPSVTLFPPSSEELQANKATLVCLISDFYPGAVTVAWKADSSPVKAGVETTTPSKQSNNKYAASSYLSLTPEQWKSHRSYSCQVTHEGSTVEKTVAPTECS

SEQ ID NO: 1599 - protein, 5 aa, synthetic construct
  REGION 1..5: note = Description of Artificial Sequence: Synthetic peptide
SYSMI

SEQ ID NO: 1600 - protein, 17 aa, synthetic construct
  REGION 1..17: note = Description of Artificial Sequence: Synthetic peptide
SISSSSDYIYNADSVKG

SEQ ID NO: 1601 - protein, 9 aa, synthetic construct
  REGION 1..9: note = Description of Artificial Sequence: Synthetic peptide
DWELLGFDC

SEQ ID NO: 1602 - protein, 11 aa, synthetic construct
  REGION 1..11: note = Description of Artificial Sequence: Synthetic peptide
SGDKLGDKYAC

SEQ ID NO: 1603 - protein, 7 aa, synthetic construct
  REGION 1..7: note = Description of Artificial Sequence: Synthetic peptide
QHNKRPS

SEQ ID NO: 1604 - protein, 9 aa, synthetic construct
  REGION 1..9: note = Description of Artificial Sequence: Synthetic peptide
QAWDSTTVV

SEQ ID NO: 1605 - protein, 7 aa, synthetic construct
  REGION 1..7: note = Description of Artificial Sequence: Synthetic peptide
GFTFSSY

SEQ ID NO: 1606 - protein, 6 aa, synthetic construct
  REGION 1..6: note = Description of Artificial Sequence: Synthetic peptide
SSSSDY

SEQ ID NO: 1607 - protein, 8 aa, synthetic construct
  REGION 1..8: note = Description of Artificial Sequence: Synthetic peptide
DWELLGFD

SEQ ID NO: 1608 - protein, 7 aa, synthetic construct
  REGION 1..7: note = Description of Artificial Sequence: Synthetic peptide
DKLGDKY

SEQ ID NO: 1609 - skipped

SEQ ID NO: 1610 - protein, 6 aa, synthetic construct
  REGION 1..6: note = Description of Artificial Sequence: Synthetic peptide
WDSTTV

SEQ ID NO: 1611 - protein, 10 aa, synthetic construct
  REGION 1..10: note = Description of Artificial Sequence: Synthetic peptide
GFTFSSYSMI

SEQ ID NO: 1612 - protein, 10 aa, synthetic construct
  REGION 1..10: note = Description of Artificial Sequence: Synthetic peptide
SISSSSDYIY

SEQ ID NO: 1613 - protein, 9 aa, synthetic construct
  REGION 1..9: note = Description of Artificial Sequence: Synthetic peptide
DWELLGFDC

SEQ ID NO: 1614 - protein, 11 aa, synthetic construct
  REGION 1..11: note = Description of Artificial Sequence: Synthetic peptide
SGDKLGDKYAC

SEQ ID NO: 1615 - protein, 7 aa, synthetic construct
  REGION 1..7: note = Description of Artificial Sequence: Synthetic peptide
QHNKRPS

SEQ ID NO: 1616 - protein, 9 aa, synthetic construct
  REGION 1..9: note = Description of Artificial Sequence: Synthetic peptide
QAWDSTTVV

SEQ ID NO: 1617 - protein, 6 aa, synthetic construct
  REGION 1..6: note = Description of Artificial Sequence: Synthetic peptide
SSYSMI

SEQ ID NO: 1618 - protein, 13 aa, synthetic construct
  REGION 1..13: note = Description of Artificial Sequence: Synthetic peptide
WVSSISSSSDYIY

SEQ ID NO: 1619 - protein, 10 aa, synthetic construct
  REGION 1..10: note = Description of Artificial Sequence: Synthetic peptide
ARDWELLGFD

SEQ ID NO: 1620 - protein, 7 aa, synthetic construct
  REGION 1..7: note = Description of Artificial Sequence: Synthetic peptide
DKYACWY

SEQ ID NO: 1621 - protein, 10 aa, synthetic construct
  REGION 1..10: note = Description of Artificial Sequence: Synthetic peptide
LVIYQHNKRP

SEQ ID NO: 1622 - protein, 8 aa, synthetic construct
  REGION 1..8: note = Description of Artificial Sequence: Synthetic peptide
QAWDSTTV

SEQ ID NO: 1623 - protein, 8 aa, synthetic construct
  REGION 1..8: note = Description of Artificial Sequence: Synthetic peptide
GFTFSSYS

SEQ ID NO: 1624 - protein, 8 aa, synthetic construct
  REGION 1..8: note = Description of Artificial Sequence: Synthetic peptide
ISSSSDYI

SEQ ID NO: 1625 - protein, 11 aa, synthetic construct
  REGION 1..11: note = Description of Artificial Sequence: Synthetic peptide
ARDWELLGFDC

SEQ ID NO: 1626 - protein, 6 aa, synthetic construct
  REGION 1..6: note = Description of Artificial Sequence: Synthetic peptide
KLGDKY

SEQ ID NO: 1627 - skipped

SEQ ID NO: 1628 - protein, 9 aa, synthetic construct
  REGION 1..9: note = Description of Artificial Sequence: Synthetic peptide
QAWDSTTVV

SEQ ID NO: 1629 - protein, 118 aa, synthetic construct
  REGION 1..118: note = Description of Artificial Sequence: Synthetic polypeptide
EVQLVESGGGLVRPGGSLRLSCEASGFTFSSYSMIWVRQAPGKGLEWVSSISSSSDYIYNADSVKGRFTISRDNAKNSLYLQMNSLRAEDTAVYYCARDWELLGFDCWGQGTTVTVSS

SEQ ID NO: 1630 - protein, 106 aa, synthetic construct; identical to SEQ ID NO: 236
  REGION 1..106: note = Description of Artificial Sequence: Synthetic polypeptide

SEQ ID NO: 1631 - protein, 448 aa, synthetic construct
  REGION 1..448: note = Description of Artificial Sequence: Synthetic polypeptide
EVQLVESGGGLVRPGGSLRLSCEASGFTFSSYSMIWVRQAPGKGLEWVSSISSSSDYIYNADSVKGRFTISRDNAKNSLYLQMNSLRAEDTAVYYCARDWELLGFDCWGQGTTVTVSSASTKGPSVFPLAPSSKSTSGGTAALGCLVKDYFPEPVTVSWNSGALTSGVHTFPAVLQSSGLYSLSSVVTVPSSSLGTQTYICNVNHKPSNTKVDKKVEPKSCDKTHTCPPCPAPELLGGPSVFLFPPKPKDTLMISRTPEVTCVVVDVSHEDPEVKFNWYVDGVEVHNAKTKPREEQYNSTYRVVSVLTVLHQDWLNGKEYKCKVSNKALPAPIEKTISKAKGQPREPQVYTLPPSREEMTKNQVSLTCLVKGFYPSDIAVEWESNGQPENNYKTTPPVLDSDGSFFLYSKLTVDKSRWQQGNVFSCSVMHEALHNHYTQKSLSLSPGK

SEQ ID NO: 1632 - protein, 212 aa, synthetic construct; identical to SEQ ID NO: 238
  REGION 1..212: note = Description of Artificial Sequence: Synthetic polypeptide

SEQ ID NO: 1633 - protein, 7 aa, synthetic construct
  REGION 1..7: note = Description of Artificial Sequence: Synthetic peptide
ISGVSVG

SEQ ID NO: 1634 - protein, 16 aa, synthetic construct
  REGION 1..16: note = Description of Artificial Sequence: Synthetic peptide
LIYWNDDKRYSPSLQS

SEQ ID NO: 1635 - protein, 12 aa, synthetic construct
  REGION 1..12: note = Description of Artificial Sequence: Synthetic peptide
SGQWLEGDAFDI

SEQ ID NO: 1636 - protein, 16 aa, synthetic construct
  REGION 1..16: note = Description of Artificial Sequence: Synthetic peptide
RSSESLVHSDGNTYLS

SEQ ID NO: 1637 - protein, 7 aa, synthetic construct
  REGION 1..7: note = Description of Artificial Sequence: Synthetic peptide
KISNRFS

SEQ ID NO: 1638 - protein, 9 aa, synthetic construct
  REGION 1..9: note = Description of Artificial Sequence: Synthetic peptide
MQATQFPLT

SEQ ID NO: 1639 - protein, 9 aa, synthetic construct
  REGION 1..9: note = Description of Artificial Sequence: Synthetic peptide
GFSLSISGV

SEQ ID NO: 1640 - protein, 5 aa, synthetic construct
  REGION 1..5: note = Description of Artificial Sequence: Synthetic peptide
YWNDD

SEQ ID NO: 1641 - protein, 11 aa, synthetic construct
  REGION 1..11: note = Description of Artificial Sequence: Synthetic peptide
SGQWLEGDAFD

SEQ ID NO: 1642 - protein, 12 aa, synthetic construct
  REGION 1..12: note = Description of Artificial Sequence: Synthetic peptide
SESLVHSDGNTY

SEQ ID NO: 1643 - skipped

SEQ ID NO: 1644 - protein, 6 aa, synthetic construct
  REGION 1..6: note = Description of Artificial Sequence: Synthetic peptide
ATQFPL

SEQ ID NO: 1645 - protein, 12 aa, synthetic construct
  REGION 1..12: note = Description of Artificial Sequence: Synthetic peptide
GFSLSISGVSVG

SEQ ID NO: 1646 - protein, 9 aa, synthetic construct
  REGION 1..9: note = Description of Artificial Sequence: Synthetic peptide
LIYWNDDKR

SEQ ID NO: 1647 - protein, 12 aa, synthetic construct
  REGION 1..12: note = Description of Artificial Sequence: Synthetic peptide
SGQWLEGDAFDI

SEQ ID NO: 1648 - protein, 16 aa, synthetic construct
  REGION 1..16: note = Description of Artificial Sequence: Synthetic peptide
RSSESLVHSDGNTYLS

SEQ ID NO: 1649 - protein, 7 aa, synthetic construct
  REGION 1..7: note = Description of Artificial Sequence: Synthetic peptide
KISNRFS

SEQ ID NO: 1650 - protein, 9 aa, synthetic construct
  REGION 1..9: note = Description of Artificial Sequence: Synthetic peptide
MQATQFPLT

SEQ ID NO: 1651 - protein, 8 aa, synthetic construct
  REGION 1..8: note = Description of Artificial Sequence: Synthetic peptide
SISGVSVG

SEQ ID NO: 1652 - protein, 12 aa, synthetic construct
  REGION 1..12: note = Description of Artificial Sequence: Synthetic peptide
WLALIYWNDDKR

SEQ ID NO: 1653 - protein, 13 aa, synthetic construct
  REGION 1..13: note = Description of Artificial Sequence: Synthetic peptide
VHSGQWLEGDAFD

SEQ ID NO: 1654 - protein, 12 aa, synthetic construct
  REGION 1..12: note = Description of Artificial Sequence: Synthetic peptide
VHSDGNTYLSWL

SEQ ID NO: 1655 - protein, 10 aa, synthetic construct
  REGION 1..10: note = Description of Artificial Sequence: Synthetic peptide
LLIYKISNRF

SEQ ID NO: 1656 - protein, 8 aa, synthetic construct
  REGION 1..8: note = Description of Artificial Sequence: Synthetic peptide
MQATQFPL

SEQ ID NO: 1657 - protein, 10 aa, synthetic construct
  REGION 1..10: note = Description of Artificial Sequence: Synthetic peptide
GFSLSISGVS

SEQ ID NO: 1658 - protein, 7 aa, synthetic construct
  REGION 1..7: note = Description of Artificial Sequence: Synthetic peptide
IYWNDDK

SEQ ID NO: 1659 - protein, 14 aa, synthetic construct
  REGION 1..14: note = Description of Artificial Sequence: Synthetic peptide
VHSGQWLEGDAFDI

SEQ ID NO: 1660 - protein, 11 aa, synthetic construct
  REGION 1..11: note = Description of Artificial Sequence: Synthetic peptide
ESLVHSDGNTY

SEQ ID NO: 1661 - skipped

SEQ ID NO: 1662 - protein, 9 aa, synthetic construct
  REGION 1..9: note = Description of Artificial Sequence: Synthetic peptide
MQATQFPLT

SEQ ID NO: 1663 - protein, 122 aa, synthetic construct
  REGION 1..122: note = Description of Artificial Sequence: Synthetic polypeptide
QVQLVESGPTLVKPTQTLTLTCTFSGFSLSISGVSVGWIRQPPGKALEWLALIYWNDDKRYSPSLQSRVTITKDTSKNQVVLTVTNMDSVDTATYYCVHSGQWLEGDAFDIWGQGTMVTVSS

SEQ ID NO: 1664 - protein, 112 aa, synthetic construct
  REGION 1..112: note = Description of Artificial Sequence: Synthetic polypeptide
DIVMTQTPLSSPVTLGQPASISCRSSESLVHSDGNTYLSWLQQSPGQPPRLLIYKISNRFSGVPDRFSGSGAGTDFTLKISRVEAEDVGVYYCMQATQFPLTFGGGTKLEIK

SEQ ID NO: 1665 - protein, 452 aa, synthetic construct
  REGION 1..452: note = Description of Artificial Sequence: Synthetic polypeptide
QVQLVESGPTLVKPTQTLTLTCTFSGFSLSISGVSVGWIRQPPGKALEWLALIYWNDDKRYSPSLQSRVTITKDTSKNQVVLTVTNMDSVDTATYYCVHSGQWLEGDAFDIWGQGTMVTVSSASTKGPSVFPLAPSSKSTSGGTAALGCLVKDYFPEPVTVSWNSGALTSGVHTFPAVLQSSGLYSLSSVVTVPSSSLGTQTYICNVNHKPSNTKVDKKVEPKSCDKTHTCPPCPAPELLGGPSVFLFPPKPKDTLMISRTPEVTCVVVDVSHEDPEVKFNWYVDGVEVHNAKTKPREEQYNSTYRVVSVLTVLHQDWLNGKEYKCKVSNKALPAPIEKTISKAKGQPREPQVYTLPPSREEMTKNQVSLTCLVKGFYPSDIAVEWESNGQPENNYKTTPPVLDSDGSFFLYSKLTVDKSRWQQGNVFSCSVMHEALHNHYTQKSLSLSPGK

SEQ ID NO: 1666 - protein, 219 aa, synthetic construct
  REGION 1..219: note = Description of Artificial Sequence: Synthetic polypeptide
DIVMTQTPLSSPVTLGQPASISCRSSESLVHSDGNTYLSWLQQSPGQPPRLLIYKISNRFSGVPDRFSGSGAGTDFTLKISRVEAEDVGVYYCMQATQFPLTFGGGTKLEIKRTVAAPSVFIFPPSDEQLKSGTASVVCLLNNFYPREAKVQWKVDNALQSGNSQESVTEQDSKDSTYSLSSTLTLSKADYEKHKVYACEVTHQGLSSPVTKSFNRGEC

SEQ ID NO: 1667 - protein, 5 aa, synthetic construct
  REGION 1..5: note = Description of Artificial Sequence: Synthetic peptide
NYDMN

SEQ ID NO: 1668 - protein, 17 aa, synthetic construct
  REGION 1..17: note = Description of Artificial Sequence: Synthetic peptide
SISSSSHYIYYADSLKG

SEQ ID NO: 1669 - protein, 15 aa, synthetic construct
  REGION 1..15: note = Description of Artificial Sequence: Synthetic peptide
DRGVTTDYYYYALDV

SEQ ID NO: 1670 - protein, 11 aa, synthetic construct
  REGION 1..11: note = Description of Artificial Sequence: Synthetic peptide
RASQGIYNYLA

SEQ ID NO: 1671 - protein, 7 aa, synthetic construct
  REGION 1..7: note = Description of Artificial Sequence: Synthetic peptide
AASTLQS

SEQ ID NO: 1672 - protein, 9 aa, synthetic construct
  REGION 1..9: note = Description of Artificial Sequence: Synthetic peptide
QKYNRAPFT

SEQ ID NO: 1673 - protein, 7 aa, synthetic construct
  REGION 1..7: note = Description of Artificial Sequence: Synthetic peptide
GFSFSNY

SEQ ID NO: 1674 - protein, 6 aa, synthetic construct
  REGION 1..6: note = Description of Artificial Sequence: Synthetic peptide
SSSSHY

SEQ ID NO: 1675 - protein, 14 aa, synthetic construct
  REGION 1..14: note = Description of Artificial Sequence: Synthetic peptide
DRGVTTDYYYYALD

SEQ ID NO: 1676 - protein, 7 aa, synthetic construct
  REGION 1..7: note = Description of Artificial Sequence: Synthetic peptide
SQGIYNY

SEQ ID NO: 1677 - skipped

SEQ ID NO: 1678 - protein, 6 aa, synthetic construct
  REGION 1..6: note = Description of Artificial Sequence: Synthetic peptide
YNRAPF

SEQ ID NO: 1679 - protein, 10 aa, synthetic construct
  REGION 1..10: note = Description of Artificial Sequence: Synthetic peptide
GFSFSNYDMN

SEQ ID NO: 1680 - protein, 10 aa, synthetic construct
  REGION 1..10: note = Description of Artificial Sequence: Synthetic peptide
SISSSSHYIY

SEQ ID NO: 1681 - protein, 15 aa, synthetic construct
  REGION 1..15: note = Description of Artificial Sequence: Synthetic peptide
DRGVTTDYYYYALDV

SEQ ID NO: 1682 - protein, 11 aa, synthetic construct
  REGION 1..11: note = Description of Artificial Sequence: Synthetic peptide
RASQGIYNYLA

SEQ ID NO: 1683 - protein, 7 aa, synthetic construct
  REGION 1..7: note = Description of Artificial Sequence: Synthetic peptide
AASTLQS

SEQ ID NO: 1684 - protein, 9 aa, synthetic construct
  REGION 1..9: note = Description of Artificial Sequence: Synthetic peptide
QKYNRAPFT

SEQ ID NO: 1685 - protein, 6 aa, synthetic construct
  REGION 1..6: note = Description of Artificial Sequence: Synthetic peptide
SNYDMN

SEQ ID NO: 1686 - protein, 13 aa, synthetic construct
  REGION 1..13: note = Description of Artificial Sequence: Synthetic peptide
WVSSISSSSHYIY

SEQ ID NO: 1687 - protein, 16 aa, synthetic construct
  REGION 1..16: note = Description of Artificial Sequence: Synthetic peptide
ARDRGVTTDYYYYALD

SEQ ID NO: 1688 - protein, 7 aa, synthetic construct
  REGION 1..7: note = Description of Artificial Sequence: Synthetic peptide
YNYLAWY

SEQ ID NO: 1689 - protein, 10 aa, synthetic construct
  REGION 1..10: note = Description of Artificial Sequence: Synthetic peptide
LLIYAASTLQ

SEQ ID NO: 1690 - protein, 8 aa, synthetic construct
  REGION 1..8: note = Description of Artificial Sequence: Synthetic peptide
QKYNRAPF

SEQ ID NO: 1691 - protein, 8 aa, synthetic construct
  REGION 1..8: note = Description of Artificial Sequence: Synthetic peptide
GFSFSNYD

SEQ ID NO: 1692 - protein, 8 aa, synthetic construct
  REGION 1..8: note = Description of Artificial Sequence: Synthetic peptide
ISSSSHYI

SEQ ID NO: 1693 - protein, 17 aa, synthetic construct
  REGION 1..17: note = Description of Artificial Sequence: Synthetic peptide
ARDRGVTTDYYYYALDV

SEQ ID NO: 1694 - protein, 6 aa, synthetic construct
  REGION 1..6: note = Description of Artificial Sequence: Synthetic peptide
QGIYNY

SEQ ID NO: 1695 - skipped

SEQ ID NO: 1696 - protein, 9 aa, synthetic construct
  REGION 1..9: note = Description of Artificial Sequence: Synthetic peptide
QKYNRAPFT

SEQ ID NO: 1697 - protein, 124 aa, synthetic construct
  REGION 1..124: note = Description of Artificial Sequence: Synthetic polypeptide
EVQLLESGGGLVKPGGSLRLSCAASGFSFSNYDMNWVRQAPRKGLEWVSSISSSSHYIYYADSLKGRFTISRDNAKNSLFLQMNSLRAEDTAVYYCARDRGVTTDYYYYALDVWGQGTMVTVSS

SEQ ID NO: 1698 - protein, 107 aa, synthetic construct
  REGION 1..107: note = Description of Artificial Sequence: Synthetic polypeptide
DIVMTQSPSSLSASVGDRVTITCRASQGIYNYLAWYQQKPGNVPKLLIYAASTLQSGVPSRFSGSGSGTDFSLTISSLQPEDFTTYYCQKYNRAPFTFGPGTKVDIK

SEQ ID NO: 1699 - protein, 454 aa, synthetic construct
  REGION 1..454: note = Description of Artificial Sequence: Synthetic polypeptide
EVQLLESGGGLVKPGGSLRLSCAASGFSFSNYDMNWVRQAPRKGLEWVSSISSSSHYIYYADSLKGRFTISRDNAKNSLFLQMNSLRAEDTAVYYCARDRGVTTDYYYYALDVWGQGTMVTVSSASTKGPSVFPLAPSSKSTSGGTAALGCLVKDYFPEPVTVSWNSGALTSGVHTFPAVLQSSGLYSLSSVVTVPSSSLGTQTYICNVNHKPSNTKVDKKVEPKSCDKTHTCPPCPAPELLGGPSVFLFPPKPKDTLMISRTPEVTCVVVDVSHEDPEVKFNWYVDGVEVHNAKTKPREEQYNSTYRVVSVLTVLHQDWLNGKEYKCKVSNKALPAPIEKTISKAKGQPREPQVYTLPPSREEMTKNQVSLTCLVKGFYPSDIAVEWESNGQPENNYKTTPPVLDSDGSFFLYSKLTVDKSRWQQGNVFSCSVMHEALHNHYTQKSLSLSPGK

SEQ ID NO: 1700 - protein, 214 aa, synthetic construct
  REGION 1..214: note = Description of Artificial Sequence: Synthetic polypeptide
DIVMTQSPSSLSASVGDRVTITCRASQGIYNYLAWYQQKPGNVPKLLIYAASTLQSGVPSRFSGSGSGTDFSLTISSLQPEDFTTYYCQKYNRAPFTFGPGTKVDIKRTVAAPSVFIFPPSDEQLKSGTASVVCLLNNFYPREAKVQWKVDNALQSGNSQESVTEQDSKDSTYSLSSTLTLSKADYEKHKVYACEVTHQGLSSPVTKSFNRGEC

SEQ ID NO: 1701 - protein, 5 aa, synthetic construct
  REGION 1..5: note = Description of Artificial Sequence: Synthetic peptide
TYGMH

SEQ ID NO: 1702 - protein, 17 aa, synthetic construct
  REGION 1..17: note = Description of Artificial Sequence: Synthetic peptide
VIWYNGSNKYYADSVKG

SEQ ID NO: 1703 - protein, 9 aa, synthetic construct
  REGION 1..9: note = Description of Artificial Sequence: Synthetic peptide
GGFGESFDS

SEQ ID NO: 1704 - protein, 11 aa, synthetic construct
  REGION 1..11: note = Description of Artificial Sequence: Synthetic peptide
RASQSVIDYLA

SEQ ID NO: 1705 - protein, 7 aa, synthetic construct
  REGION 1..7: note = Description of Artificial Sequence: Synthetic peptide
DASNRAT

SEQ ID NO: 1706 - protein, 9 aa, synthetic construct
  REGION 1..9: note = Description of Artificial Sequence: Synthetic peptide
QQRSNWPLT

SEQ ID NO: 1707 - protein, 7 aa, synthetic construct
  REGION 1..7: note = Description of Artificial Sequence: Synthetic peptide
GFTFGTY

SEQ ID NO: 1708 - protein, 6 aa, synthetic construct
  REGION 1..6: note = Description of Artificial Sequence: Synthetic peptide
WYNGSN

SEQ ID NO: 1709 - protein, 8 aa, synthetic construct
  REGION 1..8: note = Description of Artificial Sequence: Synthetic peptide
GGFGESFD

SEQ ID NO: 1710 - protein, 7 aa, synthetic construct
  REGION 1..7: note = Description of Artificial Sequence: Synthetic peptide
SQSVIDY

SEQ ID NO: 1711 - skipped

SEQ ID NO: 1712 - protein, 6 aa, synthetic construct
  REGION 1..6: note = Description of Artificial Sequence: Synthetic peptide
RSNWPL

SEQ ID NO: 1713 - protein, 10 aa, synthetic construct
  REGION 1..10: note = Description of Artificial Sequence: Synthetic peptide
GFTFGTYGMH

SEQ ID NO: 1714 - protein, 10 aa, synthetic construct
  REGION 1..10: note = Description of Artificial Sequence: Synthetic peptide
VIWYNGSNKY

SEQ ID NO: 1715 - protein, 9 aa, synthetic construct
  REGION 1..9: note = Description of Artificial Sequence: Synthetic peptide
GGFGESFDS

SEQ ID NO: 1716 - protein, 11 aa, synthetic construct
  REGION 1..11: note = Description of Artificial Sequence: Synthetic peptide
RASQSVIDYLA

SEQ ID NO: 1717 - protein, 7 aa, synthetic construct
  REGION 1..7: note = Description of Artificial Sequence: Synthetic peptide
DASNRAT

SEQ ID NO: 1718 - protein, 9 aa, synthetic construct
  REGION 1..9: note = Description of Artificial Sequence: Synthetic peptide
QQRSNWPLT

SEQ ID NO: 1719 - protein, 6 aa, synthetic construct
  REGION 1..6: note = Description of Artificial Sequence: Synthetic peptide
GTYGMH

SEQ ID NO: 1720 - protein, 13 aa, synthetic construct
  REGION 1..13: note = Description of Artificial Sequence: Synthetic peptide
WVAVIWYNGSNKY

SEQ ID NO: 1721 - protein, 10 aa, synthetic construct
  REGION 1..10: note = Description of Artificial Sequence: Synthetic peptide
ARGGFGESFD

SEQ ID NO: 1722 - protein, 7 aa, synthetic construct
  REGION 1..7: note = Description of Artificial Sequence: Synthetic peptide
IDYLAWF

SEQ ID NO: 1723 - protein, 10 aa, synthetic construct
  REGION 1..10: note = Description of Artificial Sequence: Synthetic peptide
LLIYDASNRA

SEQ ID NO: 1724 - protein, 8 aa, synthetic construct
  REGION 1..8: note = Description of Artificial Sequence: Synthetic peptide
QQRSNWPL

SEQ ID NO: 1725 - protein, 8 aa, synthetic construct
  REGION 1..8: note = Description of Artificial Sequence: Synthetic peptide
GFTFGTYG

SEQ ID NO: 1726 - protein, 8 aa, synthetic construct
  REGION 1..8: note = Description of Artificial Sequence: Synthetic peptide
IWYNGSNK

SEQ ID NO: 1727 - protein, 11 aa, synthetic construct
  REGION 1..11: note = Description of Artificial Sequence: Synthetic peptide
ARGGFGESFDS

SEQ ID NO: 1728 - protein, 6 aa, synthetic construct
  REGION 1..6: note = Description of Artificial Sequence: Synthetic peptide
QSVIDY

SEQ ID NO: 1729 - skipped

SEQ ID NO: 1730 - protein, 9 aa, synthetic construct
  REGION 1..9: note = Description of Artificial Sequence: Synthetic peptide
QQRSNWPLT

SEQ ID NO: 1731 - protein, 118 aa, synthetic construct
  REGION 1..118: note = Description of Artificial Sequence: Synthetic polypeptide
EVQLVESGGGVVQPGKSLRLSCTASGFTFGTYGMHWVRQAPGKGLDWVAVIWYNGSNKYYADSVKGRFTISRDNSKNTLYLQMNSLRTEDTAVYYCARGGFGESFDSWGQGTLVTVSS

SEQ ID NO: 1732 - protein, 107 aa, synthetic construct
  REGION 1..107: note = Description of Artificial Sequence: Synthetic polypeptide
DIVMTQTPATLSLSPGERATLSCRASQSVIDYLAWFQQKPGQAPRLLIYDASNRATGIPARFSGSGSGTDFTLTISSLEPEDFAVYYCQQRSNWPLTFGGGTKVEIK

SEQ ID NO: 1733 - protein, 448 aa, synthetic construct
  REGION 1..448: note = Description of Artificial Sequence: Synthetic polypeptide
EVQLVESGGGVVQPGKSLRLSCTASGFTFGTYGMHWVRQAPGKGLDWVAVIWYNGSNKYYADSVKGRFTISRDNSKNTLYLQMNSLRTEDTAVYYCARGGFGESFDSWGQGTLVTVSSASTKGPSVFPLAPSSKSTSGGTAALGCLVKDYFPEPVTVSWNSGALTSGVHTFPAVLQSSGLYSLSSVVTVPSSSLGTQTYICNVNHKPSNTKVDKKVEPKSCDKTHTCPPCPAPELLGGPSVFLFPPKPKDTLMISRTPEVTCVVVDVSHEDPEVKFNWYVDGVEVHNAKTKPREEQYNSTYRVVSVLTVLHQDWLNGKEYKCKVSNKALPAPIEKTISKAKGQPREPQVYTLPPSREEMTKNQVSLTCLVKGFYPSDIAVEWESNGQPENNYKTTPPVLDSDGSFFLYSKLTVDKSRWQQGNVFSCSVMHEALHNHYTQKSLSLSPGK

SEQ ID NO: 1734 - protein, 214 aa, synthetic construct
  REGION 1..214: note = Description of Artificial Sequence: Synthetic polypeptide
DIVMTQTPATLSLSPGERATLSCRASQSVIDYLAWFQQKPGQAPRLLIYDASNRATGIPARFSGSGSGTDFTLTISSLEPEDFAVYYCQQRSNWPLTFGGGTKVEIKRTVAAPSVFIFPPSDEQLKSGTASVVCLLNNFYPREAKVQWKVDNALQSGNSQESVTEQDSKDSTYSLSSTLTLSKADYEKHKVYACEVTHQGLSSPVTKSFNRGEC

SEQ ID NO: 1735 - protein, 5 aa, synthetic construct
  REGION 1..5: note = Description of Artificial Sequence: Synthetic peptide
TYTMN

SEQ ID NO: 1736 - protein, 17 aa, synthetic construct
  REGION 1..17: note = Description of Artificial Sequence: Synthetic peptide
SISSSSFYMDYADSVKG

SEQ ID NO: 1737 - protein, 14 aa, synthetic construct
  REGION 1..14: note = Description of Artificial Sequence: Synthetic peptide
DGDIVATIRGSFDY

SEQ ID NO: 1738 - protein, 11 aa, synthetic construct
  REGION 1..11: note = Description of Artificial Sequence: Synthetic peptide
RASQDITNFLA

SEQ ID NO: 1739 - protein, 7 aa, synthetic construct
  REGION 1..7: note = Description of Artificial Sequence: Synthetic peptide
TASTLQS

SEQ ID NO: 1740 - protein, 9 aa, synthetic construct
  REGION 1..9: note = Description of Artificial Sequence: Synthetic peptide
QKYNSAPFT

SEQ ID NO: 1741 - protein, 7 aa, synthetic construct
  REGION 1..7: note = Description of Artificial Sequence: Synthetic peptide
GFTFSTY

SEQ ID NO: 1742 - protein, 6 aa, synthetic construct
  REGION 1..6: note = Description of Artificial Sequence: Synthetic peptide
SSSSFY

SEQ ID NO: 1743 - protein, 13 aa, synthetic construct
  REGION 1..13: note = Description of Artificial Sequence: Synthetic peptide
DGDIVATIRGSFD

SEQ ID NO: 1744 - protein, 7 aa, synthetic construct
  REGION 1..7: note = Description of Artificial Sequence: Synthetic peptide
SQDITNF

SEQ ID NO: 1745 - skipped

SEQ ID NO: 1746 - protein, 6 aa, synthetic construct
  REGION 1..6: note = Description of Artificial Sequence: Synthetic peptide
YNSAPF

SEQ ID NO: 1747 - protein, 10 aa, synthetic construct
  REGION 1..10: note = Description of Artificial Sequence: Synthetic peptide
GFTFSTYTMN

SEQ ID NO: 1748 - protein, 10 aa, synthetic construct
  REGION 1..10: note = Description of Artificial Sequence: Synthetic peptide
SISSSSFYMD

SEQ ID NO: 1749 - protein, 14 aa, synthetic construct
  REGION 1..14: note = Description of Artificial Sequence: Synthetic peptide
DGDIVATIRGSFDY

SEQ ID NO: 1750 - protein, 11 aa, synthetic construct
  REGION 1..11: note = Description of Artificial Sequence: Synthetic peptide
RASQDITNFLA

SEQ ID NO: 1751 - protein, 7 aa, synthetic construct
  REGION 1..7: note = Description of Artificial Sequence: Synthetic peptide
TASTLQS

SEQ ID NO: 1752 - protein, 9 aa, synthetic construct
  REGION 1..9: note = Description of Artificial Sequence: Synthetic peptide
QKYNSAPFT

SEQ ID NO: 1753 - protein, 6 aa, synthetic construct
  REGION 1..6: note = Description of Artificial Sequence: Synthetic peptide
STYTMN

SEQ ID NO: 1754 - protein, 13 aa, synthetic construct
  REGION 1..13: note = Description of Artificial Sequence: Synthetic peptide
WVSSISSSSFYMD

SEQ ID NO: 1755 - protein, 15 aa, synthetic construct
  REGION 1..15: note = Description of Artificial Sequence: Synthetic peptide
ARDGDIVATIRGSFD

SEQ ID NO: 1756 - protein, 7 aa, synthetic construct
  REGION 1..7: note = Description of Artificial Sequence: Synthetic peptide
TNFLAWY

SEQ ID NO: 1757 - protein, 10 aa, synthetic construct
  REGION 1..10: note = Description of Artificial Sequence: Synthetic peptide
LLIYTASTLQ

SEQ ID NO: 1758 - protein, 8 aa, synthetic construct
  REGION 1..8: note = Description of Artificial Sequence: Synthetic peptide
QKYNSAPF

SEQ ID NO: 1759 - protein, 8 aa, synthetic construct
  REGION 1..8: note = Description of Artificial Sequence: Synthetic peptide
GFTFSTYT

SEQ ID NO: 1760 - protein, 8 aa, synthetic construct
  REGION 1..8: note = Description of Artificial Sequence: Synthetic peptide
ISSSSFYM

SEQ ID NO: 1761 - protein, 16 aa, synthetic construct
  REGION 1..16: note = Description of Artificial Sequence: Synthetic peptide
ARDGDIVATIRGSFDY

SEQ ID NO: 1762 - protein, 6 aa, synthetic construct
  REGION 1..6: note = Description of Artificial Sequence: Synthetic peptide
QDITNF

SEQ ID NO: 1763 - skipped

SEQ ID NO: 1764 - protein, 9 aa, synthetic construct
  REGION 1..9: note = Description of Artificial Sequence: Synthetic peptide
QKYNSAPFT

SEQ ID NO: 1765 - protein, 123 aa, synthetic construct
  REGION 1..123: note = Description of Artificial Sequence: Synthetic polypeptide
EVQLVESGGGLVKPGGSLRLSCAASGFTFSTYTMNWVRQAPGKGLEWVSSISSSSFYMDYADSVKGRFTISRDNAKNSLSLLMNSLRAEDTAVYYCARDGDIVATIRGSFDYWGQGTMVTVSS

SEQ ID NO: 1766 - protein, 107 aa, synthetic construct
  REGION 1..107: note = Description of Artificial Sequence: Synthetic polypeptide
EIVLTQSPSSLSTSVGDRVTITCRASQDITNFLAWYQQKPGKLPKLLIYTASTLQSGVPSRFSGSASGPDFTLTISSLQPEDVATYYCQKYNSAPFTFGPGTKVEIK

SEQ ID NO: 1767 - protein, 453 aa, synthetic construct
  REGION 1..453: note = Description of Artificial Sequence: Synthetic polypeptide
EVQLVESGGGLVKPGGSLRLSCAASGFTFSTYTMNWVRQAPGKGLEWVSSISSSSFYMDYADSVKGRFTISRDNAKNSLSLLMNSLRAEDTAVYYCARDGDIVATIRGSFDYWGQGTMVTVSSASTKGPSVFPLAPSSKSTSGGTAALGCLVKDYFPEPVTVSWNSGALTSGVHTFPAVLQSSGLYSLSSVVTVPSSSLGTQTYICNVNHKPSNTKVDKKVEPKSCDKTHTCPPCPAPELLGGPSVFLFPPKPKDTLMISRTPEVTCVVVDVSHEDPEVKFNWYVDGVEVHNAKTKPREEQYNSTYRVVSVLTVLHQDWLNGKEYKCKVSNKALPAPIEKTISKAKGQPREPQVYTLPPSREEMTKNQVSLTCLVKGFYPSDIAVEWESNGQPENNYKTTPPVLDSDGSFFLYSKLTVDKSRWQQGNVFSCSVMHEALHNHYTQKSLSLSPGK

SEQ ID NO: 1768 - protein, 214 aa, synthetic construct
  REGION 1..214: note = Description of Artificial Sequence: Synthetic polypeptide
EIVLTQSPSSLSTSVGDRVTITCRASQDITNFLAWYQQKPGKLPKLLIYTASTLQSGVPSRFSGSASGPDFTLTISSLQPEDVATYYCQKYNSAPFTFGPGTKVEIKRTVAAPSVFIFPPSDEQLKSGTASVVCLLNNFYPREAKVQWKVDNALQSGNSQESVTEQDSKDSTYSLSSTLTLSKADYEKHKVYACEVTHQGLSSPVTKSFNRGEC

SEQ ID NO: 1769 - protein, 5 aa, synthetic construct
  REGION 1..5: note = Description of Artificial Sequence: Synthetic peptide
RYAMN

SEQ ID NO: 1770 - protein, 17 aa, synthetic construct
  REGION 1..17: note = Description of Artificial Sequence: Synthetic peptide
FISGTGYTVYYADSVKG

SEQ ID NO: 1771 - protein, 8 aa, synthetic construct
  REGION 1..8: note = Description of Artificial Sequence: Synthetic peptide
DQEPGFDY

SEQ ID NO: 1772 - protein, 16 aa, synthetic construct
  REGION 1..16: note = Description of Artificial Sequence: Synthetic peptide
RSGQSLVHSDGNTYLS

SEQ ID NO: 1773 - protein, 7 aa, synthetic construct
  REGION 1..7: note = Description of Artificial Sequence: Synthetic peptide
KISNRFS

SEQ ID NO: 1774 - protein, 9 aa, synthetic construct
  REGION 1..9: note = Description of Artificial Sequence: Synthetic peptide
MQATHFPFT

SEQ ID NO: 1775 - protein, 7 aa, synthetic construct
  REGION 1..7: note = Description of Artificial Sequence: Synthetic peptide
GFTFSRY

SEQ ID NO: 1776 - protein, 6 aa, synthetic construct
  REGION 1..6: note = Description of Artificial Sequence: Synthetic peptide
SGTGYT

SEQ ID NO: 1777 - protein, 7 aa, synthetic construct
  REGION 1..7: note = Description of Artificial Sequence: Synthetic peptide
DQEPGFD

SEQ ID NO: 1778 - protein, 12 aa, synthetic construct
  REGION 1..12: note = Description of Artificial Sequence: Synthetic peptide
GQSLVHSDGNTY

SEQ ID NO: 1779 - skipped

SEQ ID NO: 1780 - protein, 6 aa, synthetic construct
  REGION 1..6: note = Description of Artificial Sequence: Synthetic peptide
ATHFPF

SEQ ID NO: 1781 - protein, 10 aa, synthetic construct
  REGION 1..10: note = Description of Artificial Sequence: Synthetic peptide
GFTFSRYAMN

SEQ ID NO: 1782 - protein, 10 aa, synthetic construct
  REGION 1..10: note = Description of Artificial Sequence: Synthetic peptide
FISGTGYTVY

SEQ ID NO: 1783 - protein, 8 aa, synthetic construct
  REGION 1..8: note = Description of Artificial Sequence: Synthetic peptide
DQEPGFDY

SEQ ID NO: 1784 - protein, 16 aa, synthetic construct
  REGION 1..16: note = Description of Artificial Sequence: Synthetic peptide
RSGQSLVHSDGNTYLS

SEQ ID NO: 1785 - protein, 7 aa, synthetic construct
  REGION 1..7: note = Description of Artificial Sequence: Synthetic peptide
KISNRFS

SEQ ID NO: 1786 - protein, 9 aa, synthetic construct
  REGION 1..9: note = Description of Artificial Sequence: Synthetic peptide
MQATHFPFT

SEQ ID NO: 1787 - protein, 6 aa, synthetic construct
  REGION 1..6: note = Description of Artificial Sequence: Synthetic peptide
SRYAMN

SEQ ID NO: 1788 - protein, 13 aa, synthetic construct
  REGION 1..13: note = Description of Artificial Sequence: Synthetic peptide
WVSFISGTGYTVY

SEQ ID NO: 1789 - protein, 9 aa, synthetic construct
  REGION 1..9: note = Description of Artificial Sequence: Synthetic peptide
ARDQEPGFD

SEQ ID NO: 1790 - protein, 12 aa, synthetic construct
  REGION 1..12: note = Description of Artificial Sequence: Synthetic peptide
VHSDGNTYLSWL

SEQ ID NO: 1791 - protein, 10 aa, synthetic construct
  REGION 1..10: note = Description of Artificial Sequence: Synthetic peptide
LLIYKISNRF

SEQ ID NO: 1792 - protein, 8 aa, synthetic construct
  REGION 1..8: note = Description of Artificial Sequence: Synthetic peptide
MQATHFPF

SEQ ID NO: 1793 - protein, 8 aa, synthetic construct
  REGION 1..8: note = Description of Artificial Sequence: Synthetic peptide
GFTFSRYA

SEQ ID NO: 1794 - protein, 8 aa, synthetic construct
  REGION 1..8: note = Description of Artificial Sequence: Synthetic peptide
ISGTGYTV

SEQ ID NO: 1795 - protein, 10 aa, synthetic construct
  REGION 1..10: note = Description of Artificial Sequence: Synthetic peptide
ARDQEPGFDY

SEQ ID NO: 1796 - protein, 11 aa, synthetic construct
  REGION 1..11: note = Description of Artificial Sequence: Synthetic peptide
QSLVHSDGNTY

SEQ ID NO: 1797 - skipped

SEQ ID NO: 1798 - protein, 9 aa, synthetic construct
  REGION 1..9: note = Description of Artificial Sequence: Synthetic peptide
MQATHFPFT

SEQ ID NO: 1799 - protein, 117 aa, synthetic construct
  REGION 1..117: note = Description of Artificial Sequence: Synthetic polypeptide
EVQLVQSGGDLLQPGGSLRLSCAASGFTFSRYAMNWVRQAPGKGLEWVSFISGTGYTVYYADSVKGRFTISRDNAKNSLYLQMNSLRDEDTAVYYCARDQEPGFDYWGQGTLVTVSS

SEQ ID NO: 1800 - protein, 112 aa, synthetic construct
  REGION 1..112: note = Description of Artificial Sequence: Synthetic polypeptide
DIVMTQTPLSSPVTLGQPASISCRSGQSLVHSDGNTYLSWLQQRPGQPPRLLIYKISNRFSGVPDRFSGSGAGTDFTLKISRVEAEDVGVYYCMQATHFPFTFGQGTKLEIK

SEQ ID NO: 1801 - protein, 447 aa, synthetic construct
  REGION 1..447: note = Description of Artificial Sequence: Synthetic polypeptide
EVQLVQSGGDLLQPGGSLRLSCAASGFTFSRYAMNWVRQAPGKGLEWVSFISGTGYTVYYADSVKGRFTISRDNAKNSLYLQMNSLRDEDTAVYYCARDQEPGFDYWGQGTLVTVSSASTKGPSVFPLAPSSKSTSGGTAALGCLVKDYFPEPVTVSWNSGALTSGVHTFPAVLQSSGLYSLSSVVTVPSSSLGTQTYICNVNHKPSNTKVDKKVEPKSCDKTHTCPPCPAPELLGGPSVFLFPPKPKDTLMISRTPEVTCVVVDVSHEDPEVKFNWYVDGVEVHNAKTKPREEQYNSTYRVVSVLTVLHQDWLNGKEYKCKVSNKALPAPIEKTISKAKGQPREPQVYTLPPSREEMTKNQVSLTCLVKGFYPSDIAVEWESNGQPENNYKTTPPVLDSDGSFFLYSKLTVDKSRWQQGNVFSCSVMHEALHNHYTQKSLSLSPGK

SEQ ID NO: 1802 - protein, 219 aa, synthetic construct
  REGION 1..219: note = Description of Artificial Sequence: Synthetic polypeptide
DIVMTQTPLSSPVTLGQPASISCRSGQSLVHSDGNTYLSWLQQRPGQPPRLLIYKISNRFSGVPDRFSGSGAGTDFTLKISRVEAEDVGVYYCMQATHFPFTFGQGTKLEIKRTVAAPSVFIFPPSDEQLKSGTASVVCLLNNFYPREAKVQWKVDNALQSGNSQESVTEQDSKDSTYSLSSTLTLSKADYEKHKVYACEVTHQGLSSPVTKSFNRGEC

SEQ ID NO: 1803 - protein, 5 aa, synthetic construct
  REGION 1..5: note = Description of Artificial Sequence: Synthetic peptide
SHDMN

SEQ ID NO: 1804 - protein, 17 aa, synthetic construct
  REGION 1..17: note = Description of Artificial Sequence: Synthetic peptide
SISSSSSYIFYADSVKG

SEQ ID NO: 1805 - protein, 16 aa, synthetic construct
  REGION 1..16: note = Description of Artificial Sequence: Synthetic peptide
DLGVGVRDYYYYGMDV

SEQ ID NO: 1806 - protein, 11 aa, synthetic construct
  REGION 1..11: note = Description of Artificial Sequence: Synthetic peptide
RASQDITNYLA

SEQ ID NO: 1807 - protein, 7 aa, synthetic construct
  REGION 1..7: note = Description of Artificial Sequence: Synthetic peptide
AASSLQG

SEQ ID NO: 1808 - protein, 9 aa, synthetic construct
  REGION 1..9: note = Description of Artificial Sequence: Synthetic peptide
LQHDTYPYT

SEQ ID NO: 1809 - protein, 7 aa, synthetic construct
  REGION 1..7: note = Description of Artificial Sequence: Synthetic peptide
GFTFSSH

SEQ ID NO: 1810 - protein, 6 aa, synthetic construct
  REGION 1..6: note = Description of Artificial Sequence: Synthetic peptide
SSSSSY

SEQ ID NO: 1811 - protein, 15 aa, synthetic construct
  REGION 1..15: note = Description of Artificial Sequence: Synthetic peptide
DLGVGVRDYYYYGMD

SEQ ID NO: 1812 - protein, 7 aa, synthetic construct
  REGION 1..7: note = Description of Artificial Sequence: Synthetic peptide
SQDITNY

SEQ ID NO: 1813 - skipped

SEQ ID NO: 1814 - protein, 6 aa, synthetic construct
  REGION 1..6: note = Description of Artificial Sequence: Synthetic peptide
HDTYPY

SEQ ID NO: 1815 - protein, 10 aa, synthetic construct
  REGION 1..10: note = Description of Artificial Sequence: Synthetic peptide
GFTFSSHDMN

SEQ ID NO: 1816 - protein, 10 aa, synthetic construct
  REGION 1..10: note = Description of Artificial Sequence: Synthetic peptide
SISSSSSYIF

SEQ ID NO: 1817 - protein, 16 aa, synthetic construct
  REGION 1..16: note = Description of Artificial Sequence: Synthetic peptide
DLGVGVRDYYYYGMDV

SEQ ID NO: 1818 - protein, 11 aa, synthetic construct
  REGION 1..11: note = Description of Artificial Sequence: Synthetic peptide
RASQDITNYLA

SEQ ID NO: 1819 - protein, 7 aa, synthetic construct
  REGION 1..7: note = Description of Artificial Sequence: Synthetic peptide
AASSLQG

SEQ ID NO: 1820 - protein, 9 aa, synthetic construct
  REGION 1..9: note = Description of Artificial Sequence: Synthetic peptide
LQHDTYPYT

SEQ ID NO: 1821 - protein, 6 aa, synthetic construct
  REGION 1..6: note = Description of Artificial Sequence: Synthetic peptide
SSHDMN

SEQ ID NO: 1822 - protein, 13 aa, synthetic construct
  REGION 1..13: note = Description of Artificial Sequence: Synthetic peptide
WVSSISSSSSYIF

SEQ ID NO: 1823 - protein, 17 aa, synthetic construct
  REGION 1..17: note = Description of Artificial Sequence: Synthetic peptide
ARDLGVGVRDYYYYGMD

SEQ ID NO: 1824 - protein, 7 aa, synthetic construct
  REGION 1..7: note = Description of Artificial Sequence: Synthetic peptide
TNYLAWF

SEQ ID NO: 1825 - protein, 10 aa, synthetic construct
  REGION 1..10: note = Description of Artificial Sequence: Synthetic peptide
RLIYAASSLQ

SEQ ID NO: 1826 - protein, 8 aa, synthetic construct
  REGION 1..8: note = Description of Artificial Sequence: Synthetic peptide
LQHDTYPY

SEQ ID NO: 1827 - protein, 8 aa, synthetic construct
  REGION 1..8: note = Description of Artificial Sequence: Synthetic peptide
GFTFSSHD

SEQ ID NO: 1828 - protein, 8 aa, synthetic construct
  REGION 1..8: note = Description of Artificial Sequence: Synthetic peptide
ISSSSSYI

SEQ ID NO: 1829 - protein, 18 aa, synthetic construct
  REGION 1..18: note = Description of Artificial Sequence: Synthetic peptide
ARDLGVGVRDYYYYGMDV

SEQ ID NO: 1830 - protein, 6 aa, synthetic construct
  REGION 1..6: note = Description of Artificial Sequence: Synthetic peptide
QDITNY

SEQ ID NO: 1831 - skipped

SEQ ID NO: 1832 - protein, 9 aa, synthetic construct
  REGION 1..9: note = Description of Artificial Sequence: Synthetic peptide
LQHDTYPYT

SEQ ID NO: 1833 - protein, 125 aa, synthetic construct
  REGION 1..125: note = Description of Artificial Sequence: Synthetic polypeptide
EVQLVESGGGLVKPGGSLRLSCAASGFTFSSHDMNWVRQAPGKGLGWVSSISSSSSYIFYADSVKGRFTISRDNAKNSLYLQMSSLRAEDTAVYYCARDLGVGVRDYYYYGMDVWGQGTMVTVSS

SEQ ID NO: 1834 - protein, 107 aa, synthetic construct
  REGION 1..107: note = Description of Artificial Sequence: Synthetic polypeptide
DIQMTQSPSAMSASVGDRVTITCRASQDITNYLAWFQQKPGKVPKRLIYAASSLQGGVPSRFSGSGSGTEFTLTISSLQPEDFSTYYCLQHDTYPYTFGQGTKLEIK

SEQ ID NO: 1835 - protein, 455 aa, synthetic construct
  REGION 1..455: note = Description of Artificial Sequence: Synthetic polypeptide
EVQLVESGGGLVKPGGSLRLSCAASGFTFSSHDMNWVRQAPGKGLGWVSSISSSSSYIFYADSVKGRFTISRDNAKNSLYLQMSSLRAEDTAVYYCARDLGVGVRDYYYYGMDVWGQGTMVTVSSASTKGPSVFPLAPSSKSTSGGTAALGCLVKDYFPEPVTVSWNSGALTSGVHTFPAVLQSSGLYSLSSVVTVPSSSLGTQTYICNVNHKPSNTKVDKKVEPKSCDKTHTCPPCPAPELLGGPSVFLFPPKPKDTLMISRTPEVTCVVVDVSHEDPEVKFNWYVDGVEVHNAKTKPREEQYNSTYRVVSVLTVLHQDWLNGKEYKCKVSNKALPAPIEKTISKAKGQPREPQVYTLPPSREEMTKNQVSLTCLVKGFYPSDIAVEWESNGQPENNYKTTPPVLDSDGSFFLYSKLTVDKSRWQQGNVFSCSVMHEALHNHYTQKSLSLSPGK

SEQ ID NO: 1836 - protein, 214 aa, synthetic construct
  REGION 1..214: note = Description of Artificial Sequence: Synthetic polypeptide
DIQMTQSPSAMSASVGDRVTITCRASQDITNYLAWFQQKPGKVPKRLIYAASSLQGGVPSRFSGSGSGTEFTLTISSLQPEDFSTYYCLQHDTYPYTFGQGTKLEIKRTVAAPSVFIFPPSDEQLKSGTASVVCLLNNFYPREAKVQWKVDNALQSGNSQESVTEQDSKDSTYSLSSTLTLSKADYEKHKVYACEVTHQGLSSPVTKSFNRGEC

SEQ ID NO: 1837 - protein, 7 aa, synthetic construct
  REGION 1..7: note = Description of Artificial Sequence: Synthetic peptide
TYGVGVG

SEQ ID NO: 1838 - protein, 16 aa, synthetic construct
  REGION 1..16: note = Description of Artificial Sequence: Synthetic peptide
LIYWNDDKRYYPSLNN

SEQ ID NO: 1839 - protein, 11 aa, synthetic construct
  REGION 1..11: note = Description of Artificial Sequence: Synthetic peptide
DYDFWSGYFDY

SEQ ID NO: 1840 - protein, 12 aa, synthetic construct
  REGION 1..12: note = Description of Artificial Sequence: Synthetic peptide
RASQSVSSSYLA

SEQ ID NO: 1841 - protein, 7 aa, synthetic construct
  REGION 1..7: note = Description of Artificial Sequence: Synthetic peptide
GASSRAT

SEQ ID NO: 1842 - protein, 9 aa, synthetic construct
  REGION 1..9: note = Description of Artificial Sequence: Synthetic peptide
QQYGSSPLT

SEQ ID NO: 1843 - protein, 9 aa, synthetic construct
  REGION 1..9: note = Description of Artificial Sequence: Synthetic peptide
GFSLTTYGV

SEQ ID NO: 1844 - protein, 5 aa, synthetic construct
  REGION 1..5: note = Description of Artificial Sequence: Synthetic peptide
YWNDD

SEQ ID NO: 1845 - protein, 10 aa, synthetic construct
  REGION 1..10: note = Description of Artificial Sequence: Synthetic peptide
DYDFWSGYFD

SEQ ID NO: 1846 - protein, 8 aa, synthetic construct
  REGION 1..8: note = Description of Artificial Sequence: Synthetic peptide
SQSVSSSY

SEQ ID NO: 1847 - skipped

SEQ ID NO: 1848 - protein, 6 aa, synthetic construct
  REGION 1..6: note = Description of Artificial Sequence: Synthetic peptide
YGSSPL

SEQ ID NO: 1849 - protein, 12 aa, synthetic construct
  REGION 1..12: note = Description of Artificial Sequence: Synthetic peptide
GFSLTTYGVGVG

SEQ ID NO: 1850 - protein, 9 aa, synthetic construct
  REGION 1..9: note = Description of Artificial Sequence: Synthetic peptide
LIYWNDDKR

SEQ ID NO: 1851 - protein, 11 aa, synthetic construct
  REGION 1..11: note = Description of Artificial Sequence: Synthetic peptide
DYDFWSGYFDY

SEQ ID NO: 1852 - protein, 12 aa, synthetic construct
  REGION 1..12: note = Description of Artificial Sequence: Synthetic peptide
RASQSVSSSYLA

SEQ ID NO: 1853 - protein, 7 aa, synthetic construct
  REGION 1..7: note = Description of Artificial Sequence: Synthetic peptide
GASSRAT

SEQ ID NO: 1854 - protein, 9 aa, synthetic construct
  REGION 1..9: note = Description of Artificial Sequence: Synthetic peptide
QQYGSSPLT

SEQ ID NO: 1855 - protein, 8 aa, synthetic construct
  REGION 1..8: note = Description of Artificial Sequence: Synthetic peptide
TTYGVGVG

SEQ ID NO: 1856 - protein, 12 aa, synthetic construct
  REGION 1..12: note = Description of Artificial Sequence: Synthetic peptide
WLALIYWNDDKR

SEQ ID NO: 1857 - protein, 12 aa, synthetic construct
  REGION 1..12: note = Description of Artificial Sequence: Synthetic peptide
AHDYDFWSGYFD

SEQ ID NO: 1858 - protein, 8 aa, synthetic construct
  REGION 1..8: note = Description of Artificial Sequence: Synthetic peptide
SSSYLAWY

SEQ ID NO: 1859 - protein, 10 aa, synthetic construct
  REGION 1..10: note = Description of Artificial Sequence: Synthetic peptide
LLIYGASSRA

SEQ ID NO: 1860 - protein, 8 aa, synthetic construct
  REGION 1..8: note = Description of Artificial Sequence: Synthetic peptide
QQYGSSPL

SEQ ID NO: 1861 - protein, 10 aa, synthetic construct
  REGION 1..10: note = Description of Artificial Sequence: Synthetic peptide
GFSLTTYGVG

SEQ ID NO: 1862 - protein, 7 aa, synthetic construct
  REGION 1..7: note = Description of Artificial Sequence: Synthetic peptide
IYWNDDK

SEQ ID NO: 1863 - protein, 13 aa, synthetic construct
  REGION 1..13: note = Description of Artificial Sequence: Synthetic peptide
AHDYDFWSGYFDY

SEQ ID NO: 1864 - protein, 7 aa, synthetic construct
  REGION 1..7: note = Description of Artificial Sequence: Synthetic peptide
QSVSSSY

SEQ ID NO: 1865 - skipped

SEQ ID NO: 1866 - protein, 9 aa, synthetic construct
  REGION 1..9: note = Description of Artificial Sequence: Synthetic peptide
QQYGSSPLT

SEQ ID NO: 1867 - protein, 121 aa, synthetic construct
  REGION 1..121: note = Description of Artificial Sequence: Synthetic polypeptide
QVTLKESGPTLVTPSQTLTLTCTFSGFSLTTYGVGVGWIRQPPGKALEWLALIYWNDDKRYYPSLNNRLTITKDTSKHLVVLTLTNMDPVDTATYYCAHDYDFWSGYFDYWGQGTLVTVSS

SEQ ID NO: 1868 - protein, 108 aa, synthetic construct
  REGION 1..108: note = Description of Artificial Sequence: Synthetic polypeptide
DIVMTQSPGTLSLSPGERATLSCRASQSVSSSYLAWYQQKPGQAPRLLIYGASSRATGIPDRFSGSGSGTDFTLTISRLEPEDFAVYYCQQYGSSPLTFGGGTKVEIK

SEQ ID NO: 1869 - protein, 451 aa, synthetic construct
  REGION 1..451: note = Description of Artificial Sequence: Synthetic polypeptide
QVTLKESGPTLVTPSQTLTLTCTFSGFSLTTYGVGVGWIRQPPGKALEWLALIYWNDDKRYYPSLNNRLTITKDTSKHLVVLTLTNMDPVDTATYYCAHDYDFWSGYFDYWGQGTLVTVSSASTKGPSVFPLAPSSKSTSGGTAALGCLVKDYFPEPVTVSWNSGALTSGVHTFPAVLQSSGLYSLSSVVTVPSSSLGTQTYICNVNHKPSNTKVDKKVEPKSCDKTHTCPPCPAPELLGGPSVFLFPPKPKDTLMISRTPEVTCVVVDVSHEDPEVKFNWYVDGVEVHNAKTKPREEQYNSTYRVVSVLTVLHQDWLNGKEYKCKVSNKALPAPIEKTISKAKGQPREPQVYTLPPSREEMTKNQVSLTCLVKGFYPSDIAVEWESNGQPENNYKTTPPVLDSDGSFFLYSKLTVDKSRWQQGNVFSCSVMHEALHNHYTQKSLSLSPGK

SEQ ID NO: 1870 - protein, 215 aa, synthetic construct
  REGION 1..215: note = Description of Artificial Sequence: Synthetic polypeptide
DIVMTQSPGTLSLSPGERATLSCRASQSVSSSYLAWYQQKPGQAPRLLIYGASSRATGIPDRFSGSGSGTDFTLTISRLEPEDFAVYYCQQYGSSPLTFGGGTKVEIKRTVAAPSVFIFPPSDEQLKSGTASVVCLLNNFYPREAKVQWKVDNALQSGNSQESVTEQDSKDSTYSLSSTLTLSKADYEKHKVYACEVTHQGLSSPVTKSFNRGEC

SEQ ID NO: 1871 - protein, 5 aa, synthetic construct
  REGION 1..5: note = Description of Artificial Sequence: Synthetic peptide
GYYMH

SEQ ID NO: 1872 - protein, 17 aa, synthetic construct
  REGION 1..17: note = Description of Artificial Sequence: Synthetic peptide
RINPNSGVTHYAQKFQG

SEQ ID NO: 1873 - protein, 14 aa, synthetic construct
  REGION 1..14: note = Description of Artificial Sequence: Synthetic peptide
GGSLVRGVISGLDY

SEQ ID NO: 1874 - protein, 12 aa, synthetic construct
  REGION 1..12: note = Description of Artificial Sequence: Synthetic peptide
RASQSFSGSYLA

SEQ ID NO: 1875 - protein, 7 aa, synthetic construct
  REGION 1..7: note = Description of Artificial Sequence: Synthetic peptide
GASSRAT

SEQ ID NO: 1876 - protein, 10 aa, synthetic construct
  REGION 1..10: note = Description of Artificial Sequence: Synthetic peptide
QQYGSSPPYT

SEQ ID NO: 1877 - protein, 7 aa, synthetic construct
  REGION 1..7: note = Description of Artificial Sequence: Synthetic peptide
GYTFTGY

SEQ ID NO: 1878 - protein, 6 aa, synthetic construct
  REGION 1..6: note = Description of Artificial Sequence: Synthetic peptide
NPNSGV

SEQ ID NO: 1879 - protein, 13 aa, synthetic construct
  REGION 1..13: note = Description of Artificial Sequence: Synthetic peptide
GGSLVRGVISGLD

SEQ ID NO: 1880 - protein, 8 aa, synthetic construct
  REGION 1..8: note = Description of Artificial Sequence: Synthetic peptide
SQSFSGSY

SEQ ID NO: 1881 - skipped

SEQ ID NO: 1882 - protein, 7 aa, synthetic construct
  REGION 1..7: note = Description of Artificial Sequence: Synthetic peptide
YGSSPPY

SEQ ID NO: 1883 - protein, 10 aa, synthetic construct
  REGION 1..10: note = Description of Artificial Sequence: Synthetic peptide
GYTFTGYYMH

SEQ ID NO: 1884 - protein, 10 aa, synthetic construct
  REGION 1..10: note = Description of Artificial Sequence: Synthetic peptide
RINPNSGVTH

SEQ ID NO: 1885 - protein, 14 aa, synthetic construct
  REGION 1..14: note = Description of Artificial Sequence: Synthetic peptide
GGSLVRGVISGLDY

SEQ ID NO: 1886 - protein, 12 aa, synthetic construct
  REGION 1..12: note = Description of Artificial Sequence: Synthetic peptide
RASQSFSGSYLA

SEQ ID NO: 1887 - protein, 7 aa, synthetic construct
  REGION 1..7: note = Description of Artificial Sequence: Synthetic peptide
GASSRAT

SEQ ID NO: 1888 - protein, 10 aa, synthetic construct
  REGION 1..10: note = Description of Artificial Sequence: Synthetic peptide
QQYGSSPPYT

SEQ ID NO: 1889 - protein, 6 aa, synthetic construct
  REGION 1..6: note = Description of Artificial Sequence: Synthetic peptide
TGYYMH

SEQ ID NO: 1890 - protein, 13 aa, synthetic construct
  REGION 1..13: note = Description of Artificial Sequence: Synthetic peptide
WMGRINPNSGVTH

SEQ ID NO: 1891 - protein, 15 aa, synthetic construct
  REGION 1..15: note = Description of Artificial Sequence: Synthetic peptide
ARGGSLVRGVISGLD

SEQ ID NO: 1892 - protein, 8 aa, synthetic construct
  REGION 1..8: note = Description of Artificial Sequence: Synthetic peptide
SGSYLAWY

SEQ ID NO: 1893 - protein, 10 aa, synthetic construct
  REGION 1..10: note = Description of Artificial Sequence: Synthetic peptide
LLIYGASSRA

SEQ ID NO: 1894 - protein, 9 aa, synthetic construct
  REGION 1..9: note = Description of Artificial Sequence: Synthetic peptide
QQYGSSPPY

SEQ ID NO: 1895 - protein, 8 aa, synthetic construct
  REGION 1..8: note = Description of Artificial Sequence: Synthetic peptide
GYTFTGYY

SEQ ID NO: 1896 - protein, 8 aa, synthetic construct
  REGION 1..8: note = Description of Artificial Sequence: Synthetic peptide
INPNSGVT

SEQ ID NO: 1897 - protein, 16 aa, synthetic construct
  REGION 1..16: note = Description of Artificial Sequence: Synthetic peptide
ARGGSLVRGVISGLDY

SEQ ID NO: 1898 - protein, 7 aa, synthetic construct
  REGION 1..7: note = Description of Artificial Sequence: Synthetic peptide
QSFSGSY

SEQ ID NO: 1899 - skipped

SEQ ID NO: 1900 - protein, 10 aa, synthetic construct
  REGION 1..10: note = Description of Artificial Sequence: Synthetic peptide
QQYGSSPPYT

SEQ ID NO: 1901 - protein, 123 aa, synthetic construct
  REGION 1..123: note = Description of Artificial Sequence: Synthetic polypeptide
QVQLVQSGAEVKKPGASVKVSCKASGYTFTGYYMHWVRQAPGQGLEWMGRINPNSGVTHYAQKFQGRVTMTRDTSISTAYMELSRLRSDDTAVYYCARGGSLVRGVISGLDYWGQGTTVTVSS

SEQ ID NO: 1902 - protein, 109 aa, synthetic construct
  REGION 1..109: note = Description of Artificial Sequence: Synthetic polypeptide
DIVMTQSPGTLSLSPGERATLSCRASQSFSGSYLAWYQQKPGQAPSLLIYGASSRATGIPDRFSGSGSGTDFTLTISRLEPEDFALYYCQQYGSSPPYTFGQGTKVEIK

SEQ ID NO: 1903 - protein, 453 aa, synthetic construct
  REGION 1..453: note = Description of Artificial Sequence: Synthetic polypeptide
QVQLVQSGAEVKKPGASVKVSCKASGYTFTGYYMHWVRQAPGQGLEWMGRINPNSGVTHYAQKFQGRVTMTRDTSISTAYMELSRLRSDDTAVYYCARGGSLVRGVISGLDYWGQGTTVTVSSASTKGPSVFPLAPSSKSTSGGTAALGCLVKDYFPEPVTVSWNSGALTSGVHTFPAVLQSSGLYSLSSVVTVPSSSLGTQTYICNVNHKPSNTKVDKKVEPKSCDKTHTCPPCPAPELLGGPSVFLFPPKPKDTLMISRTPEVTCVVVDVSHEDPEVKFNWYVDGVEVHNAKTKPREEQYNSTYRVVSVLTVLHQDWLNGKEYKCKVSNKALPAPIEKTISKAKGQPREPQVYTLPPSREEMTKNQVSLTCLVKGFYPSDIAVEWESNGQPENNYKTTPPVLDSDGSFFLYSKLTVDKSRWQQGNVFSCSVMHEALHNHYTQKSLSLSPGK

SEQ ID NO: 1904 - protein, 216 aa, synthetic construct
  REGION 1..216: note = Description of Artificial Sequence: Synthetic polypeptide
DIVMTQSPGTLSLSPGERATLSCRASQSFSGSYLAWYQQKPGQAPSLLIYGASSRATGIPDRFSGSGSGTDFTLTISRLEPEDFALYYCQQYGSSPPYTFGQGTKVEIKRTVAAPSVFIFPPSDEQLKSGTASVVCLLNNFYPREAKVQWKVDNALQSGNSQESVTEQDSKDSTYSLSSTLTLSKADYEKHKVYACEVTHQGLSSPVTKSFNRGEC

SEQ ID NO: 1905 - protein, 5 aa, synthetic construct
  REGION 1..5: note = Description of Artificial Sequence: Synthetic peptide
SYYMH

SEQ ID NO: 1906 - protein, 17 aa, synthetic construct
  REGION 1..17: note = Description of Artificial Sequence: Synthetic peptide
IINPSGGSTSYAQKFQG

SEQ ID NO: 1907 - protein, 9 aa, synthetic construct
  REGION 1..9: note = Description of Artificial Sequence: Synthetic peptide
GSYGWYFDL

SEQ ID NO: 1908 - protein, 12 aa, synthetic construct
  REGION 1..12: note = Description of Artificial Sequence: Synthetic peptide
RASQSVTSSYLA

SEQ ID NO: 1909 - protein, 7 aa, synthetic construct
  REGION 1..7: note = Description of Artificial Sequence: Synthetic peptide
GASSRAT

SEQ ID NO: 1910 - protein, 10 aa, synthetic construct
  REGION 1..10: note = Description of Artificial Sequence: Synthetic peptide
QQYGSSPPYT

SEQ ID NO: 1911 - protein, 7 aa, synthetic construct
  REGION 1..7: note = Description of Artificial Sequence: Synthetic peptide
GYTLTSY

SEQ ID NO: 1912 - protein, 6 aa, synthetic construct
  REGION 1..6: note = Description of Artificial Sequence: Synthetic peptide
NPSGGS

SEQ ID NO: 1913 - protein, 8 aa, synthetic construct
  REGION 1..8: note = Description of Artificial Sequence: Synthetic peptide
GSYGWYFD

SEQ ID NO: 1914 - protein, 8 aa, synthetic construct
  REGION 1..8: note = Description of Artificial Sequence: Synthetic peptide
SQSVTSSY

SEQ ID NO: 1915 - skipped

SEQ ID NO: 1916 - protein, 7 aa, synthetic construct
  REGION 1..7: note = Description of Artificial Sequence: Synthetic peptide
YGSSPPY

SEQ ID NO: 1917 - protein, 10 aa, synthetic construct
  REGION 1..10: note = Description of Artificial Sequence: Synthetic peptide
GYTLTSYYMH

SEQ ID NO: 1918 - protein, 10 aa, synthetic construct
  REGION 1..10: note = Description of Artificial Sequence: Synthetic peptide
IINPSGGSTS

SEQ ID NO: 1919 - protein, 9 aa, synthetic construct
  REGION 1..9: note = Description of Artificial Sequence: Synthetic peptide
GSYGWYFDL

SEQ ID NO: 1920 - protein, 12 aa, synthetic construct
  REGION 1..12: note = Description of Artificial Sequence: Synthetic peptide
RASQSVTSSYLA

SEQ ID NO: 1921 - protein, 7 aa, synthetic construct
  REGION 1..7: note = Description of Artificial Sequence: Synthetic peptide
GASSRAT

SEQ ID NO: 1922 - protein, 10 aa, synthetic construct
  REGION 1..10: note = Description of Artificial Sequence: Synthetic peptide
QQYGSSPPYT

SEQ ID NO: 1923 - protein, 6 aa, synthetic construct
  REGION 1..6: note = Description of Artificial Sequence: Synthetic peptide
TSYYMH

SEQ ID NO: 1924 - protein, 13 aa, synthetic construct
  REGION 1..13: note = Description of Artificial Sequence: Synthetic peptide
WMGIINPSGGSTS

SEQ ID NO: 1925 - protein, 10 aa, synthetic construct
  REGION 1..10: note = Description of Artificial Sequence: Synthetic peptide
ARGSYGWYFD

SEQ ID NO: 1926 - protein, 8 aa, synthetic construct
  REGION 1..8: note = Description of Artificial Sequence: Synthetic peptide
TSSYLAWY

SEQ ID NO: 1927 - protein, 10 aa, synthetic construct
  REGION 1..10: note = Description of Artificial Sequence: Synthetic peptide
LLIYGASSRA

SEQ ID NO: 1928 - protein, 9 aa, synthetic construct
  REGION 1..9: note = Description of Artificial Sequence: Synthetic peptide
QQYGSSPPY

SEQ ID NO: 1929 - protein, 8 aa, synthetic construct
  REGION 1..8: note = Description of Artificial Sequence: Synthetic peptide
GYTLTSYY

SEQ ID NO: 1930 - protein, 8 aa, synthetic construct
  REGION 1..8: note = Description of Artificial Sequence: Synthetic peptide
INPSGGST

SEQ ID NO: 1931 - protein, 11 aa, synthetic construct
  REGION 1..11: note = Description of Artificial Sequence: Synthetic peptide
ARGSYGWYFDL

SEQ ID NO: 1932 - protein, 7 aa, synthetic construct
  REGION 1..7: note = Description of Artificial Sequence: Synthetic peptide
QSVTSSY

SEQ ID NO: 1933 - skipped

SEQ ID NO: 1934 - protein, 10 aa, synthetic construct
  REGION 1..10: note = Description of Artificial Sequence: Synthetic peptide
QQYGSSPPYT

SEQ ID NO: 1935 - protein, 118 aa, synthetic construct
  REGION 1..118: note = Description of Artificial Sequence: Synthetic polypeptide
EVQLVESGAEVKKPGASVKVSCKASGYTLTSYYMHWVRQAPGQGLEWMGIINPSGGSTSYAQKFQGRVTMTRDTSTSTVYMELSSLRSEDTAVYYCARGSYGWYFDLWGRGTLVTVSS

SEQ ID NO: 1936 - protein, 109 aa, synthetic construct
  REGION 1..109: note = Description of Artificial Sequence: Synthetic polypeptide
EIVLTQSPGTLSLSPGERATLSCRASQSVTSSYLAWYQQKPGQTPRLLIYGASSRATGIPDRISGSGSGTDFTLTVSRLEPEDFAVYYCQQYGSSPPYTFGQGTKLEIK

SEQ ID NO: 1937 - protein, 448 aa, synthetic construct
  REGION 1..448: note = Description of Artificial Sequence: Synthetic polypeptide
EVQLVESGAEVKKPGASVKVSCKASGYTLTSYYMHWVRQAPGQGLEWMGIINPSGGSTSYAQKFQGRVTMTRDTSTSTVYMELSSLRSEDTAVYYCARGSYGWYFDLWGRGTLVTVSSASTKGPSVFPLAPSSKSTSGGTAALGCLVKDYFPEPVTVSWNSGALTSGVHTFPAVLQSSGLYSLSSVVTVPSSSLGTQTYICNVNHKPSNTKVDKKVEPKSCDKTHTCPPCPAPELLGGPSVFLFPPKPKDTLMISRTPEVTCVVVDVSHEDPEVKFNWYVDGVEVHNAKTKPREEQYNSTYRVVSVLTVLHQDWLNGKEYKCKVSNKALPAPIEKTISKAKGQPREPQVYTLPPSREEMTKNQVSLTCLVKGFYPSDIAVEWESNGQPENNYKTTPPVLDSDGSFFLYSKLTVDKSRWQQGNVFSCSVMHEALHNHYTQKSLSLSPGK

SEQ ID NO: 1938 - protein, 216 aa, synthetic construct
  REGION 1..216: note = Description of Artificial Sequence: Synthetic polypeptide
EIVLTQSPGTLSLSPGERATLSCRASQSVTSSYLAWYQQKPGQTPRLLIYGASSRATGIPDRISGSGSGTDFTLTVSRLEPEDFAVYYCQQYGSSPPYTFGQGTKLEIKRTVAAPSVFIFPPSDEQLKSGTASVVCLLNNFYPREAKVQWKVDNALQSGNSQESVTEQDSKDSTYSLSSTLTLSKADYEKHKVYACEVTHQGLSSPVTKSFNRGEC

SEQ ID NO: 1939 - protein, 5 aa, synthetic construct
  REGION 1..5: note = Description of Artificial Sequence: Synthetic peptide
NYDMN

SEQ ID NO: 1940 - protein, 17 aa, synthetic construct
  REGION 1..17: note = Description of Artificial Sequence: Synthetic peptide
SISSSSSYIYYADSVKG

SEQ ID NO: 1941 - protein, 15 aa, synthetic construct
  REGION 1..15: note = Description of Artificial Sequence: Synthetic peptide
DVGVTTDYYYYGMDV

SEQ ID NO: 1942 - protein, 11 aa, synthetic construct
  REGION 1..11: note = Description of Artificial Sequence: Synthetic peptide
RASQGINSWLA

SEQ ID NO: 1943 - protein, 7 aa, synthetic construct
  REGION 1..7: note = Description of Artificial Sequence: Synthetic peptide
AASTLQS

SEQ ID NO: 1944 - protein, 9 aa, synthetic construct
  REGION 1..9: note = Description of Artificial Sequence: Synthetic peptide
QQYNNWPRT

SEQ ID NO: 1945 - protein, 7 aa, synthetic construct
  REGION 1..7: note = Description of Artificial Sequence: Synthetic peptide
GFTFSNY

SEQ ID NO: 1946 - protein, 6 aa, synthetic construct
  REGION 1..6: note = Description of Artificial Sequence: Synthetic peptide
SSSSSY

SEQ ID NO: 1947 - protein, 14 aa, synthetic construct
  REGION 1..14: note = Description of Artificial Sequence: Synthetic peptide
DVGVTTDYYYYGMD

SEQ ID NO: 1948 - protein, 7 aa, synthetic construct
  REGION 1..7: note = Description of Artificial Sequence: Synthetic peptide
SQGINSW

SEQ ID NO: 1949 - skipped

SEQ ID NO: 1950 - protein, 6 aa, synthetic construct
  REGION 1..6: note = Description of Artificial Sequence: Synthetic peptide
YNNWPR

SEQ ID NO: 1951 - protein, 10 aa, synthetic construct
  REGION 1..10: note = Description of Artificial Sequence: Synthetic peptide
GFTFSNYDMN

SEQ ID NO: 1952 - protein, 10 aa, synthetic construct
  REGION 1..10: note = Description of Artificial Sequence: Synthetic peptide
SISSSSSYIY

SEQ ID NO: 1953 - protein, 15 aa, synthetic construct
  REGION 1..15: note = Description of Artificial Sequence: Synthetic peptide
DVGVTTDYYYYGMDV

SEQ ID NO: 1954 - protein, 11 aa, synthetic construct
  REGION 1..11: note = Description of Artificial Sequence: Synthetic peptide
RASQGINSWLA

SEQ ID NO: 1955 - protein, 7 aa, synthetic construct
  REGION 1..7: note = Description of Artificial Sequence: Synthetic peptide
AASTLQS

SEQ ID NO: 1956 - protein, 9 aa, synthetic construct
  REGION 1..9: note = Description of Artificial Sequence: Synthetic peptide
QQYNNWPRT

SEQ ID NO: 1957 - protein, 6 aa, synthetic construct
  REGION 1..6: note = Description of Artificial Sequence: Synthetic peptide
SNYDMN

SEQ ID NO: 1958 - protein, 13 aa, synthetic construct
  REGION 1..13: note = Description of Artificial Sequence: Synthetic peptide
WVSSISSSSSYIY

SEQ ID NO: 1959 - protein, 16 aa, synthetic construct
  REGION 1..16: note = Description of Artificial Sequence: Synthetic peptide
ARDVGVTTDYYYYGMD

SEQ ID NO: 1960 - protein, 7 aa, synthetic construct
  REGION 1..7: note = Description of Artificial Sequence: Synthetic peptide
NSWLAWY

SEQ ID NO: 1961 - protein, 10 aa, synthetic construct
  REGION 1..10: note = Description of Artificial Sequence: Synthetic peptide
LLIYAASTLQ

SEQ ID NO: 1962 - protein, 8 aa, synthetic construct
  REGION 1..8: note = Description of Artificial Sequence: Synthetic peptide
QQYNNWPR

SEQ ID NO: 1963 - protein, 8 aa, synthetic construct
  REGION 1..8: note = Description of Artificial Sequence: Synthetic peptide
GFTFSNYD

SEQ ID NO: 1964 - protein, 8 aa, synthetic construct
  REGION 1..8: note = Description of Artificial Sequence: Synthetic peptide
ISSSSSYI

SEQ ID NO: 1965 - protein, 17 aa, synthetic construct
  REGION 1..17: note = Description of Artificial Sequence: Synthetic peptide
ARDVGVTTDYYYYGMDV

SEQ ID NO: 1966 - protein, 6 aa, synthetic construct
  REGION 1..6: note = Description of Artificial Sequence: Synthetic peptide
QGINSW

SEQ ID NO: 1967 - skipped

SEQ ID NO: 1968 - protein, 9 aa, synthetic construct
  REGION 1..9: note = Description of Artificial Sequence: Synthetic peptide
QQYNNWPRT

SEQ ID NO: 1969 - protein, 124 aa, synthetic construct; identical to SEQ ID NO: 371
  REGION 1..124: note = Description of Artificial Sequence: Synthetic polypeptide

SEQ ID NO: 1970 - protein, 107 aa, synthetic construct
  REGION 1..107: note = Description of Artificial Sequence: Synthetic polypeptide
EIVMTQSPSSVSASVGDRVTITCRASQGINSWLAWYQQDPYKAPKLLIYAASTLQSGVPSRFGGRGSGTEFTLTISSLQPEDFAVYYCQQYNNWPRTFGQGTKVDIK

SEQ ID NO: 1971 - protein, 454 aa, synthetic construct; identical to SEQ ID NO: 373
  REGION 1..454: note = Description of Artificial Sequence: Synthetic polypeptide

SEQ ID NO: 1972 - protein, 214 aa, synthetic construct
  REGION 1..214: note = Description of Artificial Sequence: Synthetic polypeptide
EIVMTQSPSSVSASVGDRVTITCRASQGINSWLAWYQQDPYKAPKLLIYAASTLQSGVPSRFGGRGSGTEFTLTISSLQPEDFAVYYCQQYNNWPRTFGQGTKVDIKRTVAAPSVFIFPPSDEQLKSGTASVVCLLNNFYPREAKVQWKVDNALQSGNSQESVTEQDSKDSTYSLSSTLTLSKADYEKHKVYACEVTHQGLSSPVTKSFNRGEC

SEQ ID NO: 1973 - protein, 5 aa, synthetic construct
  REGION 1..5: note = Description of Artificial Sequence: Synthetic peptide
SYVIS

SEQ ID NO: 1974 - protein, 17 aa, synthetic construct
  REGION 1..17: note = Description of Artificial Sequence: Synthetic peptide
GILPILSTANYAQKFQG

SEQ ID NO: 1975 - protein, 10 aa, synthetic construct
  REGION 1..10: note = Description of Artificial Sequence: Synthetic peptide
AHDYYYGMDV

SEQ ID NO: 1976 - protein, 12 aa, synthetic construct
  REGION 1..12: note = Description of Artificial Sequence: Synthetic peptide
RASQSVSNNYLA

SEQ ID NO: 1977 - protein, 7 aa, synthetic construct
  REGION 1..7: note = Description of Artificial Sequence: Synthetic peptide
GASSRAT

SEQ ID NO: 1978 - protein, 10 aa, synthetic construct
  REGION 1..10: note = Description of Artificial Sequence: Synthetic peptide
QQYGSSPPYT

SEQ ID NO: 1979 - protein, 7 aa, synthetic construct
  REGION 1..7: note = Description of Artificial Sequence: Synthetic peptide
GGTFSSY

SEQ ID NO: 1980 - protein, 6 aa, synthetic construct
  REGION 1..6: note = Description of Artificial Sequence: Synthetic peptide
LPILST

SEQ ID NO: 1981 - protein, 9 aa, synthetic construct
  REGION 1..9: note = Description of Artificial Sequence: Synthetic peptide
AHDYYYGMD

SEQ ID NO: 1982 - protein, 8 aa, synthetic construct
  REGION 1..8: note = Description of Artificial Sequence: Synthetic peptide
SQSVSNNY

SEQ ID NO: 1983 - skipped

SEQ ID NO: 1984 - protein, 7 aa, synthetic construct
  REGION 1..7: note = Description of Artificial Sequence: Synthetic peptide
YGSSPPY

SEQ ID NO: 1985 - protein, 10 aa, synthetic construct
  REGION 1..10: note = Description of Artificial Sequence: Synthetic peptide
GGTFSSYVIS

SEQ ID NO: 1986 - protein, 10 aa, synthetic construct
  REGION 1..10: note = Description of Artificial Sequence: Synthetic peptide
GILPILSTAN

SEQ ID NO: 1987 - protein, 10 aa, synthetic construct
  REGION 1..10: note = Description of Artificial Sequence: Synthetic peptide
AHDYYYGMDV

SEQ ID NO: 1988 - protein, 12 aa, synthetic construct
  REGION 1..12: note = Description of Artificial Sequence: Synthetic peptide
RASQSVSNNYLA

SEQ ID NO: 1989 - protein, 7 aa, synthetic construct
  REGION 1..7: note = Description of Artificial Sequence: Synthetic peptide
GASSRAT

SEQ ID NO: 1990 - protein, 10 aa, synthetic construct
  REGION 1..10: note = Description of Artificial Sequence: Synthetic peptide
QQYGSSPPYT

SEQ ID NO: 1991 - protein, 6 aa, synthetic construct
  REGION 1..6: note = Description of Artificial Sequence: Synthetic peptide
SSYVIS

SEQ ID NO: 1992 - protein, 13 aa, synthetic construct
  REGION 1..13: note = Description of Artificial Sequence: Synthetic peptide
WMGGILPILSTAN

SEQ ID NO: 1993 - protein, 11 aa, synthetic construct
  REGION 1..11: note = Description of Artificial Sequence: Synthetic peptide
ARAHDYYYGMD

SEQ ID NO: 1994 - protein, 8 aa, synthetic construct
  REGION 1..8: note = Description of Artificial Sequence: Synthetic peptide
SNNYLAWY

SEQ ID NO: 1995 - protein, 10 aa, synthetic construct
  REGION 1..10: note = Description of Artificial Sequence: Synthetic peptide
LLIYGASSRA

SEQ ID NO: 1996 - protein, 9 aa, synthetic construct
  REGION 1..9: note = Description of Artificial Sequence: Synthetic peptide
QQYGSSPPY

SEQ ID NO: 1997 - protein, 8 aa, synthetic construct
  REGION 1..8: note = Description of Artificial Sequence: Synthetic peptide
GGTFSSYV

SEQ ID NO: 1998 - protein, 8 aa, synthetic construct
  REGION 1..8: note = Description of Artificial Sequence: Synthetic peptide
ILPILSTA

SEQ ID NO: 1999 - protein, 12 aa, synthetic construct
  REGION 1..12: note = Description of Artificial Sequence: Synthetic peptide
ARAHDYYYGMDV

SEQ ID NO: 2000 - protein, 7 aa, synthetic construct
  REGION 1..7: note = Description of Artificial Sequence: Synthetic peptide
QSVSNNY

SEQ ID NO: 2001 - skipped

SEQ ID NO: 2002 - protein, 10 aa, synthetic construct
  REGION 1..10: note = Description of Artificial Sequence: Synthetic peptide
QQYGSSPPYT

SEQ ID NO: 2003 - protein, 119 aa, synthetic construct
  REGION 1..119: note = Description of Artificial Sequence: Synthetic polypeptide
EVQLVQSGAEVKKPGSSVKVSCKASGGTFSSYVISWVRQAPGQGLEWMGGILPILSTANYAQKFQGRVTITADKSTSTAYMELSSLRSEDTAVYYCARAHDYYYGMDVWGQGTTVTVSS

SEQ ID NO: 2004 - protein, 109 aa, synthetic construct
  REGION 1..109: note = Description of Artificial Sequence: Synthetic polypeptide
EIVLTQSPGTLSLSPGERATLSCRASQSVSNNYLAWYQQKPGQAPRLLIYGASSRATGIPDRFSGSGSGTDFTLTISRLEPEDFAVYYCQQYGSSPPYTFGQGTKVDIK

SEQ ID NO: 2005 - protein, 449 aa, synthetic construct
  REGION 1..449: note = Description of Artificial Sequence: Synthetic polypeptide
EVQLVQSGAEVKKPGSSVKVSCKASGGTFSSYVISWVRQAPGQGLEWMGGILPILSTANYAQKFQGRVTITADKSTSTAYMELSSLRSEDTAVYYCARAHDYYYGMDVWGQGTTVTVSSASTKGPSVFPLAPSSKSTSGGTAALGCLVKDYFPEPVTVSWNSGALTSGVHTFPAVLQSSGLYSLSSVVTVPSSSLGTQTYICNVNHKPSNTKVDKKVEPKSCDKTHTCPPCPAPELLGGPSVFLFPPKPKDTLMISRTPEVTCVVVDVSHEDPEVKFNWYVDGVEVHNAKTKPREEQYNSTYRVVSVLTVLHQDWLNGKEYKCKVSNKALPAPIEKTISKAKGQPREPQVYTLPPSREEMTKNQVSLTCLVKGFYPSDIAVEWESNGQPENNYKTTPPVLDSDGSFFLYSKLTVDKSRWQQGNVFSCSVMHEALHNHYTQKSLSLSPGK

SEQ ID NO: 2006 - protein, 216 aa, synthetic construct
  REGION 1..216: note = Description of Artificial Sequence: Synthetic polypeptide
EIVLTQSPGTLSLSPGERATLSCRASQSVSNNYLAWYQQKPGQAPRLLIYGASSRATGIPDRFSGSGSGTDFTLTISRLEPEDFAVYYCQQYGSSPPYTFGQGTKVDIKRTVAAPSVFIFPPSDEQLKSGTASVVCLLNNFYPREAKVQWKVDNALQSGNSQESVTEQDSKDSTYSLSSTLTLSKADYEKHKVYACEVTHQGLSSPVTKSFNRGEC

SEQ ID NO: 2007 - protein, 5 aa, synthetic construct
  REGION 1..5: note = Description of Artificial Sequence: Synthetic peptide
GYYWN

SEQ ID NO: 2008 - protein, 16 aa, synthetic construct
  REGION 1..16: note = Description of Artificial Sequence: Synthetic peptide
RIFTTGNTNYNPSLKS

SEQ ID NO: 2009 - protein, 14 aa, synthetic construct
  REGION 1..14: note = Description of Artificial Sequence: Synthetic peptide
EKWDSSSSALYFDF

SEQ ID NO: 2010 - protein, 14 aa, synthetic construct
  REGION 1..14: note = Description of Artificial Sequence: Synthetic peptide
TGSSSNIGADYDVK

SEQ ID NO: 2011 - protein, 7 aa, synthetic construct
  REGION 1..7: note = Description of Artificial Sequence: Synthetic peptide
GNTDRPS

SEQ ID NO: 2012 - protein, 12 aa, synthetic construct
  REGION 1..12: note = Description of Artificial Sequence: Synthetic peptide
QSYDSRLTGYVV

SEQ ID NO: 2013 - protein, 7 aa, synthetic construct
  REGION 1..7: note = Description of Artificial Sequence: Synthetic peptide
GDSIRGY

SEQ ID NO: 2014 - protein, 5 aa, synthetic construct
  REGION 1..5: note = Description of Artificial Sequence: Synthetic peptide
FTTGN

SEQ ID NO: 2015 - protein, 13 aa, synthetic construct
  REGION 1..13: note = Description of Artificial Sequence: Synthetic peptide
EKWDSSSSALYFD

SEQ ID NO: 2016 - protein, 10 aa, synthetic construct
  REGION 1..10: note = Description of Artificial Sequence: Synthetic peptide
SSSNIGADYD

SEQ ID NO: 2017 - skipped

SEQ ID NO: 2018 - protein, 9 aa, synthetic construct
  REGION 1..9: note = Description of Artificial Sequence: Synthetic peptide
YDSRLTGYV

SEQ ID NO: 2019 - protein, 10 aa, synthetic construct
  REGION 1..10: note = Description of Artificial Sequence: Synthetic peptide
GDSIRGYYWN

SEQ ID NO: 2020 - protein, 9 aa, synthetic construct
  REGION 1..9: note = Description of Artificial Sequence: Synthetic peptide
RIFTTGNTN

SEQ ID NO: 2021 - protein, 14 aa, synthetic construct
  REGION 1..14: note = Description of Artificial Sequence: Synthetic peptide
EKWDSSSSALYFDF

SEQ ID NO: 2022 - protein, 14 aa, synthetic construct
  REGION 1..14: note = Description of Artificial Sequence: Synthetic peptide
TGSSSNIGADYDVK

SEQ ID NO: 2023 - protein, 7 aa, synthetic construct
  REGION 1..7: note = Description of Artificial Sequence: Synthetic peptide
GNTDRPS

SEQ ID NO: 2024 - protein, 12 aa, synthetic construct
  REGION 1..12: note = Description of Artificial Sequence: Synthetic peptide
QSYDSRLTGYVV

SEQ ID NO: 2025 - protein, 6 aa, synthetic construct
  REGION 1..6: note = Description of Artificial Sequence: Synthetic peptide
RGYYWN

SEQ ID NO: 2026 - protein, 12 aa, synthetic construct
  REGION 1..12: note = Description of Artificial Sequence: Synthetic peptide
WIGRIFTTGNTN

SEQ ID NO: 2027 - protein, 15 aa, synthetic construct
  REGION 1..15: note = Description of Artificial Sequence: Synthetic peptide
AREKWDSSSSALYFD

SEQ ID NO: 2028 - protein, 10 aa, synthetic construct
  REGION 1..10: note = Description of Artificial Sequence: Synthetic peptide
IGADYDVKWY

SEQ ID NO: 2029 - protein, 10 aa, synthetic construct
  REGION 1..10: note = Description of Artificial Sequence: Synthetic peptide
LLIYGNTDRP

SEQ ID NO: 2030 - protein, 11 aa, synthetic construct
  REGION 1..11: note = Description of Artificial Sequence: Synthetic peptide
QSYDSRLTGYV

SEQ ID NO: 2031 - protein, 8 aa, synthetic construct
  REGION 1..8: note = Description of Artificial Sequence: Synthetic peptide
GDSIRGYY

SEQ ID NO: 2032 - protein, 7 aa, synthetic construct
  REGION 1..7: note = Description of Artificial Sequence: Synthetic peptide
IFTTGNT

SEQ ID NO: 2033 - protein, 16 aa, synthetic construct
  REGION 1..16: note = Description of Artificial Sequence: Synthetic peptide
AREKWDSSSSALYFDF

SEQ ID NO: 2034 - protein, 9 aa, synthetic construct
  REGION 1..9: note = Description of Artificial Sequence: Synthetic peptide
SSNIGADYD

SEQ ID NO: 2035 - skipped

SEQ ID NO: 2036 - protein, 12 aa, synthetic construct
  REGION 1..12: note = Description of Artificial Sequence: Synthetic peptide
QSYDSRLTGYVV

SEQ ID NO: 2037 - protein, 122 aa, synthetic construct
  REGION 1..122: note = Description of Artificial Sequence: Synthetic polypeptide
EVQLVESGPGLVQPSETLSLTCTVSGDSIRGYYWNWIRQPAGKGLEWIGRIFTTGNTNYNPSLKSRLTMSLDTSKNQFSLKLNSVTAADTAVYYCAREKWDSSSSALYFDFWGQGTLVTVSS

SEQ ID NO: 2038 - protein, 112 aa, synthetic construct
  REGION 1..112: note = Description of Artificial Sequence: Synthetic polypeptide
QSVLTQAPSVSGAPGQRVTISCTGSSSNIGADYDVKWYQQLPGTAPKLLIYGNTDRPSGVPDRFSGSKSGTSASLAITGLQAEDEADYYCQSYDSRLTGYVVFGGGTKLTVL

SEQ ID NO: 2039 - protein, 452 aa, synthetic construct
  REGION 1..452: note = Description of Artificial Sequence: Synthetic polypeptide
EVQLVESGPGLVQPSETLSLTCTVSGDSIRGYYWNWIRQPAGKGLEWIGRIFTTGNTNYNPSLKSRLTMSLDTSKNQFSLKLNSVTAADTAVYYCAREKWDSSSSALYFDFWGQGTLVTVSSASTKGPSVFPLAPSSKSTSGGTAALGCLVKDYFPEPVTVSWNSGALTSGVHTFPAVLQSSGLYSLSSVVTVPSSSLGTQTYICNVNHKPSNTKVDKKVEPKSCDKTHTCPPCPAPELLGGPSVFLFPPKPKDTLMISRTPEVTCVVVDVSHEDPEVKFNWYVDGVEVHNAKTKPREEQYNSTYRVVSVLTVLHQDWLNGKEYKCKVSNKALPAPIEKTISKAKGQPREPQVYTLPPSREEMTKNQVSLTCLVKGFYPSDIAVEWESNGQPENNYKTTPPVLDSDGSFFLYSKLTVDKSRWQQGNVFSCSVMHEALHNHYTQKSLSLSPGK

SEQ ID NO: 2040 - protein, 218 aa, synthetic construct
  REGION 1..218: note = Description of Artificial Sequence: Synthetic polypeptide
QSVLTQAPSVSGAPGQRVTISCTGSSSNIGADYDVKWYQQLPGTAPKLLIYGNTDRPSGVPDRFSGSKSGTSASLAITGLQAEDEADYYCQSYDSRLTGYVVFGGGTKLTVLGQPKAAPSVTLFPPSSEELQANKATLVCLISDFYPGAVTVAWKADSSPVKAGVETTTPSKQSNNKYAASSYLSLTPEQWKSHRSYSCQVTHEGSTVEKTVAPTECS

SEQ ID NO: 2041 - protein, 7 aa, synthetic construct
  REGION 1..7: note = Description of Artificial Sequence: Synthetic peptide
TSGVGVG

SEQ ID NO: 2042 - protein, 16 aa, synthetic construct
  REGION 1..16: note = Description of Artificial Sequence: Synthetic peptide
LILWNDHTIYSPSLKS

SEQ ID NO: 2043 - protein, 11 aa, synthetic construct
  REGION 1..11: note = Description of Artificial Sequence: Synthetic peptide
DKWELRDAFDI

SEQ ID NO: 2044 - protein, 11 aa, synthetic construct
  REGION 1..11: note = Description of Artificial Sequence: Synthetic peptide
RASQGISRYLA

SEQ ID NO: 2045 - protein, 7 aa, synthetic construct
  REGION 1..7: note = Description of Artificial Sequence: Synthetic peptide
VASTLQS

SEQ ID NO: 2046 - protein, 9 aa, synthetic construct
  REGION 1..9: note = Description of Artificial Sequence: Synthetic peptide
QQLISYPYT

SEQ ID NO: 2047 - protein, 9 aa, synthetic construct
  REGION 1..9: note = Description of Artificial Sequence: Synthetic peptide
GFSLTTSGV

SEQ ID NO: 2048 - protein, 5 aa, synthetic construct
  REGION 1..5: note = Description of Artificial Sequence: Synthetic peptide
LWNDH

SEQ ID NO: 2049 - protein, 10 aa, synthetic construct
  REGION 1..10: note = Description of Artificial Sequence: Synthetic peptide
DKWELRDAFD

SEQ ID NO: 2050 - protein, 7 aa, synthetic construct
  REGION 1..7: note = Description of Artificial Sequence: Synthetic peptide
SQGISRY

SEQ ID NO: 2051 - skipped

SEQ ID NO: 2052 - protein, 6 aa, synthetic construct
  REGION 1..6: note = Description of Artificial Sequence: Synthetic peptide
LISYPY

SEQ ID NO: 2053 - protein, 12 aa, synthetic construct
  REGION 1..12: note = Description of Artificial Sequence: Synthetic peptide
GFSLTTSGVGVG

SEQ ID NO: 2054 - protein, 9 aa, synthetic construct
  REGION 1..9: note = Description of Artificial Sequence: Synthetic peptide
LILWNDHTI

SEQ ID NO: 2055 - protein, 11 aa, synthetic construct
  REGION 1..11: note = Description of Artificial Sequence: Synthetic peptide
DKWELRDAFDI

SEQ ID NO: 2056 - protein, 11 aa, synthetic construct
  REGION 1..11: note = Description of Artificial Sequence: Synthetic peptide
RASQGISRYLA

SEQ ID NO: 2057 - protein, 7 aa, synthetic construct
  REGION 1..7: note = Description of Artificial Sequence: Synthetic peptide
VASTLQS

SEQ ID NO: 2058 - protein, 9 aa, synthetic construct
  REGION 1..9: note = Description of Artificial Sequence: Synthetic peptide
QQLISYPYT

SEQ ID NO: 2059 - protein, 8 aa, synthetic construct
  REGION 1..8: note = Description of Artificial Sequence: Synthetic peptide
TTSGVGVG

SEQ ID NO: 2060 - protein, 12 aa, synthetic construct
  REGION 1..12: note = Description of Artificial Sequence: Synthetic peptide
WLALILWNDHTI

SEQ ID NO: 2061 - protein, 12 aa, synthetic construct
  REGION 1..12: note = Description of Artificial Sequence: Synthetic peptide
ARDKWELRDAFD

SEQ ID NO: 2062 - protein, 7 aa, synthetic construct
  REGION 1..7: note = Description of Artificial Sequence: Synthetic peptide
SRYLAWY

SEQ ID NO: 2063 - protein, 10 aa, synthetic construct
  REGION 1..10: note = Description of Artificial Sequence: Synthetic peptide
LLIYVASTLQ

SEQ ID NO: 2064 - protein, 8 aa, synthetic construct
  REGION 1..8: note = Description of Artificial Sequence: Synthetic peptide
QQLISYPY

SEQ ID NO: 2065 - protein, 10 aa, synthetic construct
  REGION 1..10: note = Description of Artificial Sequence: Synthetic peptide
GFSLTTSGVG

SEQ ID NO: 2066 - protein, 7 aa, synthetic construct
  REGION 1..7: note = Description of Artificial Sequence: Synthetic peptide
ILWNDHT

SEQ ID NO: 2067 - protein, 13 aa, synthetic construct
  REGION 1..13: note = Description of Artificial Sequence: Synthetic peptide
ARDKWELRDAFDI

SEQ ID NO: 2068 - protein, 6 aa, synthetic construct
  REGION 1..6: note = Description of Artificial Sequence: Synthetic peptide
QGISRY

SEQ ID NO: 2069 - skipped

SEQ ID NO: 2070 - protein, 9 aa, synthetic construct
  REGION 1..9: note = Description of Artificial Sequence: Synthetic peptide
QQLISYPYT

SEQ ID NO: 2071 - protein, 121 aa, synthetic construct
  REGION 1..121: note = Description of Artificial Sequence: Synthetic polypeptide
QVTLKESGPTLVKPTQTLTLTCTFSGFSLTTSGVGVGWIRQPPGKALEWLALILWNDHTIYSPSLKSRLTITKDTSKNQVVLTMTNMDPVDTAAYFCARDKWELRDAFDIWGQGTMVTVSS

SEQ ID NO: 2072 - protein, 107 aa, synthetic construct
  REGION 1..107: note = Description of Artificial Sequence: Synthetic polypeptide
EIVMTQSPSFLSASVGDRVTFTCRASQGISRYLAWYQQKPGRAPNLLIYVASTLQSGVPSRFSGSGSGTEFTLTISSLLPEDFATYYCQQLISYPYTFSQGTRLEIK

SEQ ID NO: 2073 - protein, 451 aa, synthetic construct
  REGION 1..451: note = Description of Artificial Sequence: Synthetic polypeptide
QVTLKESGPTLVKPTQTLTLTCTFSGFSLTTSGVGVGWIRQPPGKALEWLALILWNDHTIYSPSLKSRLTITKDTSKNQVVLTMTNMDPVDTAAYFCARDKWELRDAFDIWGQGTMVTVSSASTKGPSVFPLAPSSKSTSGGTAALGCLVKDYFPEPVTVSWNSGALTSGVHTFPAVLQSSGLYSLSSVVTVPSSSLGTQTYICNVNHKPSNTKVDKKVEPKSCDKTHTCPPCPAPELLGGPSVFLFPPKPKDTLMISRTPEVTCVVVDVSHEDPEVKFNWYVDGVEVHNAKTKPREEQYNSTYRVVSVLTVLHQDWLNGKEYKCKVSNKALPAPIEKTISKAKGQPREPQVYTLPPSREEMTKNQVSLTCLVKGFYPSDIAVEWESNGQPENNYKTTPPVLDSDGSFFLYSKLTVDKSRWQQGNVFSCSVMHEALHNHYTQKSLSLSPGK

SEQ ID NO: 2074 - protein, 214 aa, synthetic construct
  REGION 1..214: note = Description of Artificial Sequence: Synthetic polypeptide
EIVMTQSPSFLSASVGDRVTFTCRASQGISRYLAWYQQKPGRAPNLLIYVASTLQSGVPSRFSGSGSGTEFTLTISSLLPEDFATYYCQQLISYPYTFSQGTRLEIKRTVAAPSVFIFPPSDEQLKSGTASVVCLLNNFYPREAKVQWKVDNALQSGNSQESVTEQDSKDSTYSLSSTLTLSKADYEKHKVYACEVTHQGLSSPVTKSFNRGEC

SEQ ID NO: 2075 - protein, 5 aa, synthetic construct
  REGION 1..5: note = Description of Artificial Sequence: Synthetic peptide
TYSVN

SEQ ID NO: 2076 - protein, 17 aa, synthetic construct
  REGION 1..17: note = Description of Artificial Sequence: Synthetic peptide
SISSDSSYIFYADSMKG

SEQ ID NO: 2077 - protein, 9 aa, synthetic construct
  REGION 1..9: note = Description of Artificial Sequence: Synthetic peptide
DSVTGPFDY

SEQ ID NO: 2078 - protein, 11 aa, synthetic construct
  REGION 1..11: note = Description of Artificial Sequence: Synthetic peptide
QASQDISHYLN

SEQ ID NO: 2079 - protein, 7 aa, synthetic construct
  REGION 1..7: note = Description of Artificial Sequence: Synthetic peptide
DSYILET

SEQ ID NO: 2080 - protein, 9 aa, synthetic construct
  REGION 1..9: note = Description of Artificial Sequence: Synthetic peptide
QQYDNLPYT

SEQ ID NO: 2081 - protein, 7 aa, synthetic construct
  REGION 1..7: note = Description of Artificial Sequence: Synthetic peptide
GFTFSTY

SEQ ID NO: 2082 - protein, 6 aa, synthetic construct
  REGION 1..6: note = Description of Artificial Sequence: Synthetic peptide
SSDSSY

SEQ ID NO: 2083 - protein, 8 aa, synthetic construct
  REGION 1..8: note = Description of Artificial Sequence: Synthetic peptide
DSVTGPFD

SEQ ID NO: 2084 - protein, 7 aa, synthetic construct
  REGION 1..7: note = Description of Artificial Sequence: Synthetic peptide
SQDISHY

SEQ ID NO: 2085 - skipped

SEQ ID NO: 2086 - protein, 6 aa, synthetic construct
  REGION 1..6: note = Description of Artificial Sequence: Synthetic peptide
YDNLPY

SEQ ID NO: 2087 - protein, 10 aa, synthetic construct
  REGION 1..10: note = Description of Artificial Sequence: Synthetic peptide
GFTFSTYSVN

SEQ ID NO: 2088 - protein, 10 aa, synthetic construct
  REGION 1..10: note = Description of Artificial Sequence: Synthetic peptide
SISSDSSYIF

SEQ ID NO: 2089 - protein, 9 aa, synthetic construct
  REGION 1..9: note = Description of Artificial Sequence: Synthetic peptide
DSVTGPFDY

SEQ ID NO: 2090 - protein, 11 aa, synthetic construct
  REGION 1..11: note = Description of Artificial Sequence: Synthetic peptide
QASQDISHYLN

SEQ ID NO: 2091 - protein, 7 aa, synthetic construct
  REGION 1..7: note = Description of Artificial Sequence: Synthetic peptide
DSYILET

SEQ ID NO: 2092 - protein, 9 aa, synthetic construct
  REGION 1..9: note = Description of Artificial Sequence: Synthetic peptide
QQYDNLPYT

SEQ ID NO: 2093 - protein, 6 aa, synthetic construct
  REGION 1..6: note = Description of Artificial Sequence: Synthetic peptide
STYSVN

SEQ ID NO: 2094 - protein, 13 aa, synthetic construct
  REGION 1..13: note = Description of Artificial Sequence: Synthetic peptide
WVSSISSDSSYIF

SEQ ID NO: 2095 - protein, 10 aa, synthetic construct
  REGION 1..10: note = Description of Artificial Sequence: Synthetic peptide
ARDSVTGPFD

SEQ ID NO: 2096 - protein, 7 aa, synthetic construct
  REGION 1..7: note = Description of Artificial Sequence: Synthetic peptide
SHYLNWY

SEQ ID NO: 2097 - protein, 10 aa, synthetic construct
  REGION 1..10: note = Description of Artificial Sequence: Synthetic peptide
LLIYDSYILE

SEQ ID NO: 2098 - protein, 8 aa, synthetic construct
  REGION 1..8: note = Description of Artificial Sequence: Synthetic peptide
QQYDNLPY

SEQ ID NO: 2099 - protein, 8 aa, synthetic construct
  REGION 1..8: note = Description of Artificial Sequence: Synthetic peptide
GFTFSTYS

SEQ ID NO: 2100 - protein, 8 aa, synthetic construct
  REGION 1..8: note = Description of Artificial Sequence: Synthetic peptide
ISSDSSYI

SEQ ID NO: 2101 - protein, 11 aa, synthetic construct
  REGION 1..11: note = Description of Artificial Sequence: Synthetic peptide
ARDSVTGPFDY

SEQ ID NO: 2102 - protein, 6 aa, synthetic construct
  REGION 1..6: note = Description of Artificial Sequence: Synthetic peptide
QDISHY

SEQ ID NO: 2103 - skipped

SEQ ID NO: 2104 - protein, 9 aa, synthetic construct
  REGION 1..9: note = Description of Artificial Sequence: Synthetic peptide
QQYDNLPYT

SEQ ID NO: 2105 - protein, 118 aa, synthetic construct
  REGION 1..118: note = Description of Artificial Sequence: Synthetic polypeptide
QVQLLESGGGLVKPGGSLRLSCAASGFTFSTYSVNWVRQAPGKGLEWVSSISSDSSYIFYADSMKGRFTISRDNAKNSLYLHMNSLRAEDTAVYYCARDSVTGPFDYWGQGTLVTVSS

SEQ ID NO: 2106 - protein, 107 aa, synthetic construct
  REGION 1..107: note = Description of Artificial Sequence: Synthetic polypeptide
DIVMTQSPSSLSASVGDRVTITCQASQDISHYLNWYQQKPGKAPKLLIYDSYILETGVTSRFSGSGSGTDFTFTINSLQPEDIAIYYCQQYDNLPYTFGQGTKVEIK

SEQ ID NO: 2107 - protein, 448 aa, synthetic construct
  REGION 1..448: note = Description of Artificial Sequence: Synthetic polypeptide
QVQLLESGGGLVKPGGSLRLSCAASGFTFSTYSVNWVRQAPGKGLEWVSSISSDSSYIFYADSMKGRFTISRDNAKNSLYLHMNSLRAEDTAVYYCARDSVTGPFDYWGQGTLVTVSSASTKGPSVFPLAPSSKSTSGGTAALGCLVKDYFPEPVTVSWNSGALTSGVHTFPAVLQSSGLYSLSSVVTVPSSSLGTQTYICNVNHKPSNTKVDKKVEPKSCDKTHTCPPCPAPELLGGPSVFLFPPKPKDTLMISRTPEVTCVVVDVSHEDPEVKFNWYVDGVEVHNAKTKPREEQYNSTYRVVSVLTVLHQDWLNGKEYKCKVSNKALPAPIEKTISKAKGQPREPQVYTLPPSREEMTKNQVSLTCLVKGFYPSDIAVEWESNGQPENNYKTTPPVLDSDGSFFLYSKLTVDKSRWQQGNVFSCSVMHEALHNHYTQKSLSLSPGK

SEQ ID NO: 2108 - protein, 214 aa, synthetic construct
  REGION 1..214: note = Description of Artificial Sequence: Synthetic polypeptide
DIVMTQSPSSLSASVGDRVTITCQASQDISHYLNWYQQKPGKAPKLLIYDSYILETGVTSRFSGSGSGTDFTFTINSLQPEDIAIYYCQQYDNLPYTFGQGTKVEIKRTVAAPSVFIFPPSDEQLKSGTASVVCLLNNFYPREAKVQWKVDNALQSGNSQESVTEQDSKDSTYSLSSTLTLSKADYEKHKVYACEVTHQGLSSPVTKSFNRGEC

SEQ ID NO: 2109 - protein, 5 aa, synthetic construct
  REGION 1..5: note = Description of Artificial Sequence: Synthetic peptide
NYFWN

SEQ ID NO: 2110 - protein, 16 aa, synthetic construct
  REGION 1..16: note = Description of Artificial Sequence: Synthetic peptide
YIFYSGSTSYNPSLKS

SEQ ID NO: 2111 - protein, 12 aa, synthetic construct
  REGION 1..12: note = Description of Artificial Sequence: Synthetic peptide
VGRWELRTAFDI

SEQ ID NO: 2112 - protein, 13 aa, synthetic construct
  REGION 1..13: note = Description of Artificial Sequence: Synthetic peptide
SGSSSNIGSNTVN

SEQ ID NO: 2113 - protein, 7 aa, synthetic construct
  REGION 1..7: note = Description of Artificial Sequence: Synthetic peptide
SNNQRPS

SEQ ID NO: 2114 - protein, 12 aa, synthetic construct
  REGION 1..12: note = Description of Artificial Sequence: Synthetic peptide
AAWDDSLNGPGV

SEQ ID NO: 2115 - protein, 7 aa, synthetic construct
  REGION 1..7: note = Description of Artificial Sequence: Synthetic peptide
GGSITNY

SEQ ID NO: 2116 - protein, 5 aa, synthetic construct
  REGION 1..5: note = Description of Artificial Sequence: Synthetic peptide
FYSGS

SEQ ID NO: 2117 - protein, 11 aa, synthetic construct
  REGION 1..11: note = Description of Artificial Sequence: Synthetic peptide
VGRWELRTAFD

SEQ ID NO: 2118 - protein, 9 aa, synthetic construct
  REGION 1..9: note = Description of Artificial Sequence: Synthetic peptide
SSSNIGSNT

SEQ ID NO: 2119 - skipped

SEQ ID NO: 2120 - protein, 9 aa, synthetic construct
  REGION 1..9: note = Description of Artificial Sequence: Synthetic peptide
WDDSLNGPG

SEQ ID NO: 2121 - protein, 10 aa, synthetic construct
  REGION 1..10: note = Description of Artificial Sequence: Synthetic peptide
GGSITNYFWN

SEQ ID NO: 2122 - protein, 9 aa, synthetic construct
  REGION 1..9: note = Description of Artificial Sequence: Synthetic peptide
YIFYSGSTS

SEQ ID NO: 2123 - protein, 12 aa, synthetic construct
  REGION 1..12: note = Description of Artificial Sequence: Synthetic peptide
VGRWELRTAFDI

SEQ ID NO: 2124 - protein, 13 aa, synthetic construct
  REGION 1..13: note = Description of Artificial Sequence: Synthetic peptide
SGSSSNIGSNTVN

SEQ ID NO: 2125 - protein, 7 aa, synthetic construct
  REGION 1..7: note = Description of Artificial Sequence: Synthetic peptide
SNNQRPS

SEQ ID NO: 2126 - protein, 12 aa, synthetic construct
  REGION 1..12: note = Description of Artificial Sequence: Synthetic peptide
AAWDDSLNGPGV

SEQ ID NO: 2127 - protein, 6 aa, synthetic construct
  REGION 1..6: note = Description of Artificial Sequence: Synthetic peptide
TNYFWN

SEQ ID NO: 2128 - protein, 12 aa, synthetic construct
  REGION 1..12: note = Description of Artificial Sequence: Synthetic peptide
WIGYIFYSGSTS

SEQ ID NO: 2129 - protein, 13 aa, synthetic construct
  REGION 1..13: note = Description of Artificial Sequence: Synthetic peptide
ARVGRWELRTAFD

SEQ ID NO: 2130 - protein, 9 aa, synthetic construct
  REGION 1..9: note = Description of Artificial Sequence: Synthetic peptide
IGSNTVNWY

SEQ ID NO: 2131 - protein, 10 aa, synthetic construct
  REGION 1..10: note = Description of Artificial Sequence: Synthetic peptide
LLIYSNNQRP

SEQ ID NO: 2132 - protein, 11 aa, synthetic construct
  REGION 1..11: note = Description of Artificial Sequence: Synthetic peptide
AAWDDSLNGPG

SEQ ID NO: 2133 - protein, 8 aa, synthetic construct
  REGION 1..8: note = Description of Artificial Sequence: Synthetic peptide
GGSITNYF

SEQ ID NO: 2134 - protein, 7 aa, synthetic construct
  REGION 1..7: note = Description of Artificial Sequence: Synthetic peptide
IFYSGST

SEQ ID NO: 2135 - protein, 14 aa, synthetic construct
  REGION 1..14: note = Description of Artificial Sequence: Synthetic peptide
ARVGRWELRTAFDI

SEQ ID NO: 2136 - protein, 8 aa, synthetic construct
  REGION 1..8: note = Description of Artificial Sequence: Synthetic peptide
SSNIGSNT

SEQ ID NO: 2137 - skipped

SEQ ID NO: 2138 - protein, 12 aa, synthetic construct
  REGION 1..12: note = Description of Artificial Sequence: Synthetic peptide
AAWDDSLNGPGV

SEQ ID NO: 2139 - protein, 120 aa, synthetic construct
  REGION 1..120: note = Description of Artificial Sequence: Synthetic polypeptide
EVQLLESGPGLVKPSETLSLTCSVSGGSITNYFWNWIRQPPGKGLEWIGYIFYSGSTSYNPSLKSRVTISVDTSKNRFSLKLISVTAADTAVYYCARVGRWELRTAFDIWGQGTMVTVSS

SEQ ID NO: 2140 - protein, 111 aa, synthetic construct
  REGION 1..111: note = Description of Artificial Sequence: Synthetic polypeptide
QSALTQPPSASGTPGQRVTISCSGSSSNIGSNTVNWYQQLPGTAPKLLIYSNNQRPSGVPDRFSGSKSGTSASLAISGLQSEDEADYYCAAWDDSLNGPGVFGGGTKLTVL

SEQ ID NO: 2141 - protein, 450 aa, synthetic construct
  REGION 1..450: note = Description of Artificial Sequence: Synthetic polypeptide
EVQLLESGPGLVKPSETLSLTCSVSGGSITNYFWNWIRQPPGKGLEWIGYIFYSGSTSYNPSLKSRVTISVDTSKNRFSLKLISVTAADTAVYYCARVGRWELRTAFDIWGQGTMVTVSSASTKGPSVFPLAPSSKSTSGGTAALGCLVKDYFPEPVTVSWNSGALTSGVHTFPAVLQSSGLYSLSSVVTVPSSSLGTQTYICNVNHKPSNTKVDKKVEPKSCDKTHTCPPCPAPELLGGPSVFLFPPKPKDTLMISRTPEVTCVVVDVSHEDPEVKFNWYVDGVEVHNAKTKPREEQYNSTYRVVSVLTVLHQDWLNGKEYKCKVSNKALPAPIEKTISKAKGQPREPQVYTLPPSREEMTKNQVSLTCLVKGFYPSDIAVEWESNGQPENNYKTTPPVLDSDGSFFLYSKLTVDKSRWQQGNVFSCSVMHEALHNHYTQKSLSLSPGK

SEQ ID NO: 2142 - protein, 217 aa, synthetic construct
  REGION 1..217: note = Description of Artificial Sequence: Synthetic polypeptide
QSALTQPPSASGTPGQRVTISCSGSSSNIGSNTVNWYQQLPGTAPKLLIYSNNQRPSGVPDRFSGSKSGTSASLAISGLQSEDEADYYCAAWDDSLNGPGVFGGGTKLTVLGQPKAAPSVTLFPPSSEELQANKATLVCLISDFYPGAVTVAWKADSSPVKAGVETTTPSKQSNNKYAASSYLSLTPEQWKSHRSYSCQVTHEGSTVEKTVAPTECS

SEQ ID NO: 2143 - protein, 5 aa, synthetic construct
  REGION 1..5: note = Description of Artificial Sequence: Synthetic peptide
TYRMN

SEQ ID NO: 2144 - protein, 17 aa, synthetic construct
  REGION 1..17: note = Description of Artificial Sequence: Synthetic peptide
SISSSSIYIHSADSVKG

SEQ ID NO: 2145 - protein, 10 aa, synthetic construct
  REGION 1..10: note = Description of Artificial Sequence: Synthetic peptide
ERVYTVSFDY

SEQ ID NO: 2146 - protein, 11 aa, synthetic construct
  REGION 1..11: note = Description of Artificial Sequence: Synthetic peptide
QASQDISHYLN

SEQ ID NO: 2147 - protein, 7 aa, synthetic construct
  REGION 1..7: note = Description of Artificial Sequence: Synthetic peptide
DSYILET

SEQ ID NO: 2148 - protein, 9 aa, synthetic construct
  REGION 1..9: note = Description of Artificial Sequence: Synthetic peptide
QQYDNLPYT

SEQ ID NO: 2149 - protein, 7 aa, synthetic construct
  REGION 1..7: note = Description of Artificial Sequence: Synthetic peptide
GFTFTTY

SEQ ID NO: 2150 - protein, 6 aa, synthetic construct
  REGION 1..6: note = Description of Artificial Sequence: Synthetic peptide
SSSSIY

SEQ ID NO: 2151 - protein, 9 aa, synthetic construct
  REGION 1..9: note = Description of Artificial Sequence: Synthetic peptide
ERVYTVSFD

SEQ ID NO: 2152 - protein, 7 aa, synthetic construct
  REGION 1..7: note = Description of Artificial Sequence: Synthetic peptide
SQDISHY

SEQ ID NO: 2153 - skipped

SEQ ID NO: 2154 - protein, 6 aa, synthetic construct
  REGION 1..6: note = Description of Artificial Sequence: Synthetic peptide
YDNLPY

SEQ ID NO: 2155 - protein, 10 aa, synthetic construct
  REGION 1..10: note = Description of Artificial Sequence: Synthetic peptide
GFTFTTYRMN

SEQ ID NO: 2156 - protein, 10 aa, synthetic construct
  REGION 1..10: note = Description of Artificial Sequence: Synthetic peptide
SISSSSIYIH

SEQ ID NO: 2157 - protein, 10 aa, synthetic construct
  REGION 1..10: note = Description of Artificial Sequence: Synthetic peptide
ERVYTVSFDY

SEQ ID NO: 2158 - protein, 11 aa, synthetic construct
  REGION 1..11: note = Description of Artificial Sequence: Synthetic peptide
QASQDISHYLN

SEQ ID NO: 2159 - protein, 7 aa, synthetic construct
  REGION 1..7: note = Description of Artificial Sequence: Synthetic peptide
DSYILET

SEQ ID NO: 2160 - protein, 9 aa, synthetic construct
  REGION 1..9: note = Description of Artificial Sequence: Synthetic peptide
QQYDNLPYT

SEQ ID NO: 2161 - protein, 6 aa, synthetic construct
  REGION 1..6: note = Description of Artificial Sequence: Synthetic peptide
TTYRMN

SEQ ID NO: 2162 - protein, 13 aa, synthetic construct
  REGION 1..13: note = Description of Artificial Sequence: Synthetic peptide
WVSSISSSSIYIH

SEQ ID NO: 2163 - protein, 11 aa, synthetic construct
  REGION 1..11: note = Description of Artificial Sequence: Synthetic peptide
ARERVYTVSFD

SEQ ID NO: 2164 - protein, 7 aa, synthetic construct
  REGION 1..7: note = Description of Artificial Sequence: Synthetic peptide
SHYLNWY

SEQ ID NO: 2165 - protein, 10 aa, synthetic construct
  REGION 1..10: note = Description of Artificial Sequence: Synthetic peptide
LLIYDSYILE

SEQ ID NO: 2166 - protein, 8 aa, synthetic construct
  REGION 1..8: note = Description of Artificial Sequence: Synthetic peptide
QQYDNLPY

SEQ ID NO: 2167 - protein, 8 aa, synthetic construct
  REGION 1..8: note = Description of Artificial Sequence: Synthetic peptide
GFTFTTYR

SEQ ID NO: 2168 - protein, 8 aa, synthetic construct
  REGION 1..8: note = Description of Artificial Sequence: Synthetic peptide
ISSSSIYI

SEQ ID NO: 2169 - protein, 12 aa, synthetic construct
  REGION 1..12: note = Description of Artificial Sequence: Synthetic peptide
ARERVYTVSFDY

SEQ ID NO: 2170 - protein, 6 aa, synthetic construct
  REGION 1..6: note = Description of Artificial Sequence: Synthetic peptide
QDISHY

SEQ ID NO: 2171 - skipped

SEQ ID NO: 2172 - protein, 9 aa, synthetic construct
  REGION 1..9: note = Description of Artificial Sequence: Synthetic peptide
QQYDNLPYT

SEQ ID NO: 2173 - protein, 119 aa, synthetic construct
  REGION 1..119: note = Description of Artificial Sequence: Synthetic polypeptide
QVQLVQSGGGLVKPGGSLRLSCAASGFTFTTYRMNWVRQAPGKGLEWVSSISSSSIYIHSADSVKGRFTISRDNAKNSLYLQMNSLRAEDSAIYYCARERVYTVSFDYWGQGTLVTVSS

SEQ ID NO: 2174 - protein, 107 aa, synthetic construct
  REGION 1..107: note = Description of Artificial Sequence: Synthetic polypeptide
DIQMTQSPSSLSASVGDRVTITCQASQDISHYLNWYQQKPGKAPKLLIYDSYILETGVTSRFSGSGSGTDFTFTINSLQPEDIAIYYCQQYDNLPYTFGQGTKVEIK

SEQ ID NO: 2175 - protein, 449 aa, synthetic construct
  REGION 1..449: note = Description of Artificial Sequence: Synthetic polypeptide
QVQLVQSGGGLVKPGGSLRLSCAASGFTFTTYRMNWVRQAPGKGLEWVSSISSSSIYIHSADSVKGRFTISRDNAKNSLYLQMNSLRAEDSAIYYCARERVYTVSFDYWGQGTLVTVSSASTKGPSVFPLAPSSKSTSGGTAALGCLVKDYFPEPVTVSWNSGALTSGVHTFPAVLQSSGLYSLSSVVTVPSSSLGTQTYICNVNHKPSNTKVDKKVEPKSCDKTHTCPPCPAPELLGGPSVFLFPPKPKDTLMISRTPEVTCVVVDVSHEDPEVKFNWYVDGVEVHNAKTKPREEQYNSTYRVVSVLTVLHQDWLNGKEYKCKVSNKALPAPIEKTISKAKGQPREPQVYTLPPSREEMTKNQVSLTCLVKGFYPSDIAVEWESNGQPENNYKTTPPVLDSDGSFFLYSKLTVDKSRWQQGNVFSCSVMHEALHNHYTQKSLSLSPGK

SEQ ID NO: 2176 - protein, 214 aa, synthetic construct
  REGION 1..214: note = Description of Artificial Sequence: Synthetic polypeptide
DIQMTQSPSSLSASVGDRVTITCQASQDISHYLNWYQQKPGKAPKLLIYDSYILETGVTSRFSGSGSGTDFTFTINSLQPEDIAIYYCQQYDNLPYTFGQGTKVEIKRTVAAPSVFIFPPSDEQLKSGTASVVCLLNNFYPREAKVQWKVDNALQSGNSQESVTEQDSKDSTYSLSSTLTLSKADYEKHKVYACEVTHQGLSSPVTKSFNRGEC

SEQ ID NO: 2177 - protein, 7 aa, synthetic construct
  REGION 1..7: note = Description of Artificial Sequence: Synthetic peptide
THGVGVG

SEQ ID NO: 2178 - protein, 16 aa, synthetic construct
  REGION 1..16: note = Description of Artificial Sequence: Synthetic peptide
LIYWNADKHYSPSLKS

SEQ ID NO: 2179 - protein, 10 aa, synthetic construct
  REGION 1..10: note = Description of Artificial Sequence: Synthetic peptide
EGDWGHYFDF

SEQ ID NO: 2180 - protein, 13 aa, synthetic construct
  REGION 1..13: note = Description of Artificial Sequence: Synthetic peptide
SGSSSNIGNNDVS

SEQ ID NO: 2181 - protein, 7 aa, synthetic construct
  REGION 1..7: note = Description of Artificial Sequence: Synthetic peptide
DNNRRPS

SEQ ID NO: 2182 - protein, 12 aa, synthetic construct
  REGION 1..12: note = Description of Artificial Sequence: Synthetic peptide
ETWDSSLSAIWV

SEQ ID NO: 2183 - protein, 9 aa, synthetic construct
  REGION 1..9: note = Description of Artificial Sequence: Synthetic peptide
GFSLTTHGV

SEQ ID NO: 2184 - protein, 5 aa, synthetic construct
  REGION 1..5: note = Description of Artificial Sequence: Synthetic peptide
YWNAD

SEQ ID NO: 2185 - protein, 9 aa, synthetic construct
  REGION 1..9: note = Description of Artificial Sequence: Synthetic peptide
EGDWGHYFD

SEQ ID NO: 2186 - protein, 9 aa, synthetic construct
  REGION 1..9: note = Description of Artificial Sequence: Synthetic peptide
SSSNIGNND

SEQ ID NO: 2187 - skipped

SEQ ID NO: 2188 - protein, 9 aa, synthetic construct
  REGION 1..9: note = Description of Artificial Sequence: Synthetic peptide
WDSSLSAIW

SEQ ID NO: 2189 - protein, 12 aa, synthetic construct
  REGION 1..12: note = Description of Artificial Sequence: Synthetic peptide
GFSLTTHGVGVG

SEQ ID NO: 2190 - protein, 9 aa, synthetic construct
  REGION 1..9: note = Description of Artificial Sequence: Synthetic peptide
LIYWNADKH

SEQ ID NO: 2191 - protein, 10 aa, synthetic construct
  REGION 1..10: note = Description of Artificial Sequence: Synthetic peptide
EGDWGHYFDF

SEQ ID NO: 2192 - protein, 13 aa, synthetic construct
  REGION 1..13: note = Description of Artificial Sequence: Synthetic peptide
SGSSSNIGNNDVS

SEQ ID NO: 2193 - protein, 7 aa, synthetic construct
  REGION 1..7: note = Description of Artificial Sequence: Synthetic peptide
DNNRRPS

SEQ ID NO: 2194 - protein, 12 aa, synthetic construct
  REGION 1..12: note = Description of Artificial Sequence: Synthetic peptide
ETWDSSLSAIWV

SEQ ID NO: 2195 - protein, 8 aa, synthetic construct
  REGION 1..8: note = Description of Artificial Sequence: Synthetic peptide
TTHGVGVG

SEQ ID NO: 2196 - protein, 12 aa, synthetic construct
  REGION 1..12: note = Description of Artificial Sequence: Synthetic peptide
WLALIYWNADKH

SEQ ID NO: 2197 - protein, 11 aa, synthetic construct
  REGION 1..11: note = Description of Artificial Sequence: Synthetic peptide
AHEGDWGHYFD

SEQ ID NO: 2198 - protein, 9 aa, synthetic construct
  REGION 1..9: note = Description of Artificial Sequence: Synthetic peptide
IGNNDVSWY

SEQ ID NO: 2199 - protein, 10 aa, synthetic construct
  REGION 1..10: note = Description of Artificial Sequence: Synthetic peptide
LLIYDNNRRP

SEQ ID NO: 2200 - protein, 11 aa, synthetic construct
  REGION 1..11: note = Description of Artificial Sequence: Synthetic peptide
ETWDSSLSAIW

SEQ ID NO: 2201 - protein, 10 aa, synthetic construct
  REGION 1..10: note = Description of Artificial Sequence: Synthetic peptide
GFSLTTHGVG

SEQ ID NO: 2202 - protein, 7 aa, synthetic construct
  REGION 1..7: note = Description of Artificial Sequence: Synthetic peptide
IYWNADK

SEQ ID NO: 2203 - protein, 12 aa, synthetic construct
  REGION 1..12: note = Description of Artificial Sequence: Synthetic peptide
AHEGDWGHYFDF

SEQ ID NO: 2204 - protein, 8 aa, synthetic construct
  REGION 1..8: note = Description of Artificial Sequence: Synthetic peptide
SSNIGNND

SEQ ID NO: 2205 - skipped

SEQ ID NO: 2206 - protein, 12 aa, synthetic construct
  REGION 1..12: note = Description of Artificial Sequence: Synthetic peptide
ETWDSSLSAIWV

SEQ ID NO: 2207 - protein, 120 aa, synthetic construct
  REGION 1..120: note = Description of Artificial Sequence: Synthetic polypeptide
QVTLKESGPTLVKPTQTLTLTCTFSGFSLTTHGVGVGWIRQPPRKALEWLALIYWNADKHYSPSLKSRLTITKDTSKNQVVLTMTHMDPVDTATYYCAHEGDWGHYFDFWGQGTLVTVSS

SEQ ID NO: 2208 - protein, 111 aa, synthetic construct
  REGION 1..111: note = Description of Artificial Sequence: Synthetic polypeptide
QLVLTQPPSVSAAPGQKVTISCSGSSSNIGNNDVSWYQQLPGTAPKLLIYDNNRRPSGIPDRFSGSKSGTSATLGITGLQTGDEADYYCETWDSSLSAIWVFGGGTKVTVL

SEQ ID NO: 2209 - protein, 450 aa, synthetic construct
  REGION 1..450: note = Description of Artificial Sequence: Synthetic polypeptide
QVTLKESGPTLVKPTQTLTLTCTFSGFSLTTHGVGVGWIRQPPRKALEWLALIYWNADKHYSPSLKSRLTITKDTSKNQVVLTMTHMDPVDTATYYCAHEGDWGHYFDFWGQGTLVTVSSASTKGPSVFPLAPSSKSTSGGTAALGCLVKDYFPEPVTVSWNSGALTSGVHTFPAVLQSSGLYSLSSVVTVPSSSLGTQTYICNVNHKPSNTKVDKKVEPKSCDKTHTCPPCPAPELLGGPSVFLFPPKPKDTLMISRTPEVTCVVVDVSHEDPEVKFNWYVDGVEVHNAKTKPREEQYNSTYRVVSVLTVLHQDWLNGKEYKCKVSNKALPAPIEKTISKAKGQPREPQVYTLPPSREEMTKNQVSLTCLVKGFYPSDIAVEWESNGQPENNYKTTPPVLDSDGSFFLYSKLTVDKSRWQQGNVFSCSVMHEALHNHYTQKSLSLSPGK

SEQ ID NO: 2210 - protein, 217 aa, synthetic construct
  REGION 1..217: note = Description of Artificial Sequence: Synthetic polypeptide
QLVLTQPPSVSAAPGQKVTISCSGSSSNIGNNDVSWYQQLPGTAPKLLIYDNNRRPSGIPDRFSGSKSGTSATLGITGLQTGDEADYYCETWDSSLSAIWVFGGGTKVTVLGQPKAAPSVTLFPPSSEELQANKATLVCLISDFYPGAVTVAWKADSSPVKAGVETTTPSKQSNNKYAASSYLSLTPEQWKSHRSYSCQVTHEGSTVEKTVAPTECS

SEQ ID NO: 2211 - protein, 5 aa, synthetic construct
  REGION 1..5: note = Description of Artificial Sequence: Synthetic peptide
SYFWS

SEQ ID NO: 2212 - protein, 16 aa, synthetic construct
  REGION 1..16: note = Description of Artificial Sequence: Synthetic peptide
YIFYSGSTNYNPSLKS

SEQ ID NO: 2213 - protein, 12 aa, synthetic construct
  REGION 1..12: note = Description of Artificial Sequence: Synthetic peptide
VGRWELRGAFDI

SEQ ID NO: 2214 - protein, 13 aa, synthetic construct
  REGION 1..13: note = Description of Artificial Sequence: Synthetic peptide
SGSSSNIGSNTVN

SEQ ID NO: 2215 - protein, 7 aa, synthetic construct
  REGION 1..7: note = Description of Artificial Sequence: Synthetic peptide
SNNQRPS

SEQ ID NO: 2216 - protein, 12 aa, synthetic construct
  REGION 1..12: note = Description of Artificial Sequence: Synthetic peptide
AAWDDSLNSPGV

SEQ ID NO: 2217 - protein, 7 aa, synthetic construct
  REGION 1..7: note = Description of Artificial Sequence: Synthetic peptide
GGSISSY

SEQ ID NO: 2218 - protein, 5 aa, synthetic construct
  REGION 1..5: note = Description of Artificial Sequence: Synthetic peptide
FYSGS

SEQ ID NO: 2219 - protein, 11 aa, synthetic construct
  REGION 1..11: note = Description of Artificial Sequence: Synthetic peptide
VGRWELRGAFD

SEQ ID NO: 2220 - protein, 9 aa, synthetic construct
  REGION 1..9: note = Description of Artificial Sequence: Synthetic peptide
SSSNIGSNT

SEQ ID NO: 2221 - skipped

SEQ ID NO: 2222 - protein, 9 aa, synthetic construct
  REGION 1..9: note = Description of Artificial Sequence: Synthetic peptide
WDDSLNSPG

SEQ ID NO: 2223 - protein, 10 aa, synthetic construct
  REGION 1..10: note = Description of Artificial Sequence: Synthetic peptide
GGSISSYFWS

SEQ ID NO: 2224 - protein, 9 aa, synthetic construct
  REGION 1..9: note = Description of Artificial Sequence: Synthetic peptide
YIFYSGSTN

SEQ ID NO: 2225 - protein, 12 aa, synthetic construct
  REGION 1..12: note = Description of Artificial Sequence: Synthetic peptide
VGRWELRGAFDI

SEQ ID NO: 2226 - protein, 13 aa, synthetic construct
  REGION 1..13: note = Description of Artificial Sequence: Synthetic peptide
SGSSSNIGSNTVN

SEQ ID NO: 2227 - protein, 7 aa, synthetic construct
  REGION 1..7: note = Description of Artificial Sequence: Synthetic peptide
SNNQRPS

SEQ ID NO: 2228 - protein, 12 aa, synthetic construct
  REGION 1..12: note = Description of Artificial Sequence: Synthetic peptide
AAWDDSLNSPGV

SEQ ID NO: 2229 - protein, 6 aa, synthetic construct
  REGION 1..6: note = Description of Artificial Sequence: Synthetic peptide
SSYFWS

SEQ ID NO: 2230 - protein, 12 aa, synthetic construct
  REGION 1..12: note = Description of Artificial Sequence: Synthetic peptide
WIGYIFYSGSTN

SEQ ID NO: 2231 - protein, 13 aa, synthetic construct
  REGION 1..13: note = Description of Artificial Sequence: Synthetic peptide
ARVGRWELRGAFD

SEQ ID NO: 2232 - protein, 9 aa, synthetic construct
  REGION 1..9: note = Description of Artificial Sequence: Synthetic peptide
IGSNTVNWY

SEQ ID NO: 2233 - protein, 10 aa, synthetic construct
  REGION 1..10: note = Description of Artificial Sequence: Synthetic peptide
LLIYSNNQRP

SEQ ID NO: 2234 - protein, 11 aa, synthetic construct
  REGION 1..11: note = Description of Artificial Sequence: Synthetic peptide
AAWDDSLNSPG

SEQ ID NO: 2235 - protein, 8 aa, synthetic construct
  REGION 1..8: note = Description of Artificial Sequence: Synthetic peptide
GGSISSYF

SEQ ID NO: 2236 - protein, 7 aa, synthetic construct
  REGION 1..7: note = Description of Artificial Sequence: Synthetic peptide
IFYSGST

SEQ ID NO: 2237 - protein, 14 aa, synthetic construct
  REGION 1..14: note = Description of Artificial Sequence: Synthetic peptide
ARVGRWELRGAFDI

SEQ ID NO: 2238 - protein, 8 aa, synthetic construct
  REGION 1..8: note = Description of Artificial Sequence: Synthetic peptide
SSNIGSNT

SEQ ID NO: 2239 - skipped

SEQ ID NO: 2240 - protein, 12 aa, synthetic construct
  REGION 1..12: note = Description of Artificial Sequence: Synthetic peptide
AAWDDSLNSPGV

SEQ ID NO: 2241 - protein, 120 aa, synthetic construct
  REGION 1..120: note = Description of Artificial Sequence: Synthetic polypeptide
QVQLQESGPGLVKPSETLSLTCTVSGGSISSYFWSWIRQPPGKGLEWIGYIFYSGSTNYNPSLKSRVTILVDTSKNHFSLKLSSVTAADTAVYYCARVGRWELRGAFDIWGQGTMVTVSS

SEQ ID NO: 2242 - protein, 111 aa, synthetic construct
  REGION 1..111: note = Description of Artificial Sequence: Synthetic polypeptide
QPVLTQSSSASGTPGQRVTISCSGSSSNIGSNTVNWYQQFPGTAPKLLIYSNNQRPSGVPDRFSGSKSGTSASLAISGLQSEDEAEYYCAAWDDSLNSPGVFGGGTKLTVL

SEQ ID NO: 2243 - protein, 450 aa, synthetic construct
  REGION 1..450: note = Description of Artificial Sequence: Synthetic polypeptide
QVQLQESGPGLVKPSETLSLTCTVSGGSISSYFWSWIRQPPGKGLEWIGYIFYSGSTNYNPSLKSRVTILVDTSKNHFSLKLSSVTAADTAVYYCARVGRWELRGAFDIWGQGTMVTVSSASTKGPSVFPLAPSSKSTSGGTAALGCLVKDYFPEPVTVSWNSGALTSGVHTFPAVLQSSGLYSLSSVVTVPSSSLGTQTYICNVNHKPSNTKVDKKVEPKSCDKTHTCPPCPAPELLGGPSVFLFPPKPKDTLMISRTPEVTCVVVDVSHEDPEVKFNWYVDGVEVHNAKTKPREEQYNSTYRVVSVLTVLHQDWLNGKEYKCKVSNKALPAPIEKTISKAKGQPREPQVYTLPPSREEMTKNQVSLTCLVKGFYPSDIAVEWESNGQPENNYKTTPPVLDSDGSFFLYSKLTVDKSRWQQGNVFSCSVMHEALHNHYTQKSLSLSPGK

SEQ ID NO: 2244 - protein, 217 aa, synthetic construct
  REGION 1..217: note = Description of Artificial Sequence: Synthetic polypeptide
QPVLTQSSSASGTPGQRVTISCSGSSSNIGSNTVNWYQQFPGTAPKLLIYSNNQRPSGVPDRFSGSKSGTSASLAISGLQSEDEAEYYCAAWDDSLNSPGVFGGGTKLTVLGQPKAAPSVTLFPPSSEELQANKATLVCLISDFYPGAVTVAWKADSSPVKAGVETTTPSKQSNNKYAASSYLSLTPEQWKSHRSYSCQVTHEGSTVEKTVAPTECS

SEQ ID NO: 2245 - protein, 5 aa, synthetic construct
  REGION 1..5: note = Description of Artificial Sequence: Synthetic peptide
SYYWN

SEQ ID NO: 2246 - protein, 16 aa, synthetic construct
  REGION 1..16: note = Description of Artificial Sequence: Synthetic peptide
RIYTIGNTNYNPSLKS

SEQ ID NO: 2247 - protein, 17 aa, synthetic construct
  REGION 1..17: note = Description of Artificial Sequence: Synthetic peptide
EGYYDSSGSFFPGAFGI

SEQ ID NO: 2248 - protein, 14 aa, synthetic construct
  REGION 1..14: note = Description of Artificial Sequence: Synthetic peptide
TGTSNDVGSYNLVS

SEQ ID NO: 2249 - protein, 7 aa, synthetic construct
  REGION 1..7: note = Description of Artificial Sequence: Synthetic peptide
AGSKRPS

SEQ ID NO: 2250 - protein, 10 aa, synthetic construct
  REGION 1..10: note = Description of Artificial Sequence: Synthetic peptide
CSFAGATNVV

SEQ ID NO: 2251 - protein, 7 aa, synthetic construct
  REGION 1..7: note = Description of Artificial Sequence: Synthetic peptide
SGSISSY

SEQ ID NO: 2252 - protein, 5 aa, synthetic construct
  REGION 1..5: note = Description of Artificial Sequence: Synthetic peptide
YTIGN

SEQ ID NO: 2253 - protein, 16 aa, synthetic construct
  REGION 1..16: note = Description of Artificial Sequence: Synthetic peptide
EGYYDSSGSFFPGAFG

SEQ ID NO: 2254 - protein, 10 aa, synthetic construct
  REGION 1..10: note = Description of Artificial Sequence: Synthetic peptide
TSNDVGSYNL

SEQ ID NO: 2255 - skipped

SEQ ID NO: 2256 - protein, 7 aa, synthetic construct
  REGION 1..7: note = Description of Artificial Sequence: Synthetic peptide
FAGATNV

SEQ ID NO: 2257 - protein, 10 aa, synthetic construct
  REGION 1..10: note = Description of Artificial Sequence: Synthetic peptide
SGSISSYYWN

SEQ ID NO: 2258 - protein, 9 aa, synthetic construct
  REGION 1..9: note = Description of Artificial Sequence: Synthetic peptide
RIYTIGNTN

SEQ ID NO: 2259 - protein, 17 aa, synthetic construct
  REGION 1..17: note = Description of Artificial Sequence: Synthetic peptide
EGYYDSSGSFFPGAFGI

SEQ ID NO: 2260 - protein, 14 aa, synthetic construct
  REGION 1..14: note = Description of Artificial Sequence: Synthetic peptide
TGTSNDVGSYNLVS

SEQ ID NO: 2261 - protein, 7 aa, synthetic construct
  REGION 1..7: note = Description of Artificial Sequence: Synthetic peptide
AGSKRPS

SEQ ID NO: 2262 - protein, 10 aa, synthetic construct
  REGION 1..10: note = Description of Artificial Sequence: Synthetic peptide
CSFAGATNVV

SEQ ID NO: 2263 - protein, 6 aa, synthetic construct
  REGION 1..6: note = Description of Artificial Sequence: Synthetic peptide
SSYYWN

SEQ ID NO: 2264 - protein, 12 aa, synthetic construct
  REGION 1..12: note = Description of Artificial Sequence: Synthetic peptide
WVGRIYTIGNTN

SEQ ID NO: 2265 - protein, 18 aa, synthetic construct
  REGION 1..18: note = Description of Artificial Sequence: Synthetic peptide
AREGYYDSSGSFFPGAFG

SEQ ID NO: 2266 - protein, 10 aa, synthetic construct
  REGION 1..10: note = Description of Artificial Sequence: Synthetic peptide
VGSYNLVSWY

SEQ ID NO: 2267 - protein, 10 aa, synthetic construct
  REGION 1..10: note = Description of Artificial Sequence: Synthetic peptide
LMIYAGSKRP

SEQ ID NO: 2268 - protein, 9 aa, synthetic construct
  REGION 1..9: note = Description of Artificial Sequence: Synthetic peptide
CSFAGATNV

SEQ ID NO: 2269 - protein, 8 aa, synthetic construct
  REGION 1..8: note = Description of Artificial Sequence: Synthetic peptide
SGSISSYY

SEQ ID NO: 2270 - protein, 7 aa, synthetic construct
  REGION 1..7: note = Description of Artificial Sequence: Synthetic peptide
IYTIGNT

SEQ ID NO: 2271 - protein, 19 aa, synthetic construct
  REGION 1..19: note = Description of Artificial Sequence: Synthetic peptide
AREGYYDSSGSFFPGAFGI

SEQ ID NO: 2272 - protein, 9 aa, synthetic construct
  REGION 1..9: note = Description of Artificial Sequence: Synthetic peptide
SNDVGSYNL

SEQ ID NO: 2273 - skipped

SEQ ID NO: 2274 - protein, 10 aa, synthetic construct
  REGION 1..10: note = Description of Artificial Sequence: Synthetic peptide
CSFAGATNVV

SEQ ID NO: 2275 - protein, 125 aa, synthetic construct
  REGION 1..125: note = Description of Artificial Sequence: Synthetic polypeptide
QVQLQESGPGLVKPSETLSLTCTVSSGSISSYYWNWIRQPAGKGLEWVGRIYTIGNTNYNPSLKSRVTMSIDTSKNQFSLNLSSVTAADTAVYFCAREGYYDSSGSFFPGAFGIWGQGTMVTVSS

SEQ ID NO: 2276 - protein, 110 aa, synthetic construct
  REGION 1..110: note = Description of Artificial Sequence: Synthetic polypeptide
SSELTQPASVSGSPGQSITISCTGTSNDVGSYNLVSWYQQHPGKAPKLMIYAGSKRPSGISNRFSGSKSGNTASLTISGLQAEDEADYYCCSFAGATNVVFGGGTKLTVL

SEQ ID NO: 2277 - protein, 455 aa, synthetic construct
  REGION 1..455: note = Description of Artificial Sequence: Synthetic polypeptide
QVQLQESGPGLVKPSETLSLTCTVSSGSISSYYWNWIRQPAGKGLEWVGRIYTIGNTNYNPSLKSRVTMSIDTSKNQFSLNLSSVTAADTAVYFCAREGYYDSSGSFFPGAFGIWGQGTMVTVSSASTKGPSVFPLAPSSKSTSGGTAALGCLVKDYFPEPVTVSWNSGALTSGVHTFPAVLQSSGLYSLSSVVTVPSSSLGTQTYICNVNHKPSNTKVDKKVEPKSCDKTHTCPPCPAPELLGGPSVFLFPPKPKDTLMISRTPEVTCVVVDVSHEDPEVKFNWYVDGVEVHNAKTKPREEQYNSTYRVVSVLTVLHQDWLNGKEYKCKVSNKALPAPIEKTISKAKGQPREPQVYTLPPSREEMTKNQVSLTCLVKGFYPSDIAVEWESNGQPENNYKTTPPVLDSDGSFFLYSKLTVDKSRWQQGNVFSCSVMHEALHNHYTQKSLSLSPGK

SEQ ID NO: 2278 - protein, 216 aa, synthetic construct
  REGION 1..216: note = Description of Artificial Sequence: Synthetic polypeptide
SSELTQPASVSGSPGQSITISCTGTSNDVGSYNLVSWYQQHPGKAPKLMIYAGSKRPSGISNRFSGSKSGNTASLTISGLQAEDEADYYCCSFAGATNVVFGGGTKLTVLGQPKAAPSVTLFPPSSEELQANKATLVCLISDFYPGAVTVAWKADSSPVKAGVETTTPSKQSNNKYAASSYLSLTPEQWKSHRSYSCQVTHEGSTVEKTVAPTECS

SEQ ID NO: 2279 - protein, 5 aa, synthetic construct
  REGION 1..5: note = Description of Artificial Sequence: Synthetic peptide
GYYWN

SEQ ID NO: 2280 - protein, 16 aa, synthetic construct
  REGION 1..16: note = Description of Artificial Sequence: Synthetic peptide
RIFTTGNTNYNPSLKS

SEQ ID NO: 2281 - protein, 14 aa, synthetic construct
  REGION 1..14: note = Description of Artificial Sequence: Synthetic peptide
ERWDSSSSALYFDY

SEQ ID NO: 2282 - protein, 14 aa, synthetic construct
  REGION 1..14: note = Description of Artificial Sequence: Synthetic peptide
TGSSSNIGADYDIK

SEQ ID NO: 2283 - protein, 7 aa, synthetic construct
  REGION 1..7: note = Description of Artificial Sequence: Synthetic peptide
GNSNRPS

SEQ ID NO: 2284 - protein, 12 aa, synthetic construct
  REGION 1..12: note = Description of Artificial Sequence: Synthetic peptide
QSYDSSMSGYVV

SEQ ID NO: 2285 - protein, 7 aa, synthetic construct
  REGION 1..7: note = Description of Artificial Sequence: Synthetic peptide
GDSISGY

SEQ ID NO: 2286 - protein, 5 aa, synthetic construct
  REGION 1..5: note = Description of Artificial Sequence: Synthetic peptide
FTTGN

SEQ ID NO: 2287 - protein, 13 aa, synthetic construct
  REGION 1..13: note = Description of Artificial Sequence: Synthetic peptide
ERWDSSSSALYFD

SEQ ID NO: 2288 - protein, 10 aa, synthetic construct
  REGION 1..10: note = Description of Artificial Sequence: Synthetic peptide
SSSNIGADYD

SEQ ID NO: 2289 - skipped

SEQ ID NO: 2290 - protein, 9 aa, synthetic construct
  REGION 1..9: note = Description of Artificial Sequence: Synthetic peptide
YDSSMSGYV

SEQ ID NO: 2291 - protein, 10 aa, synthetic construct
  REGION 1..10: note = Description of Artificial Sequence: Synthetic peptide
GDSISGYYWN

SEQ ID NO: 2292 - protein, 9 aa, synthetic construct
  REGION 1..9: note = Description of Artificial Sequence: Synthetic peptide
RIFTTGNTN

SEQ ID NO: 2293 - protein, 14 aa, synthetic construct
  REGION 1..14: note = Description of Artificial Sequence: Synthetic peptide
ERWDSSSSALYFDY

SEQ ID NO: 2294 - protein, 14 aa, synthetic construct
  REGION 1..14: note = Description of Artificial Sequence: Synthetic peptide
TGSSSNIGADYDIK

SEQ ID NO: 2295 - protein, 7 aa, synthetic construct
  REGION 1..7: note = Description of Artificial Sequence: Synthetic peptide
GNSNRPS

SEQ ID NO: 2296 - protein, 12 aa, synthetic construct
  REGION 1..12: note = Description of Artificial Sequence: Synthetic peptide
QSYDSSMSGYVV

SEQ ID NO: 2297 - protein, 6 aa, synthetic construct
  REGION 1..6: note = Description of Artificial Sequence: Synthetic peptide
SGYYWN

SEQ ID NO: 2298 - protein, 12 aa, synthetic construct
  REGION 1..12: note = Description of Artificial Sequence: Synthetic peptide
WIGRIFTTGNTN

SEQ ID NO: 2299 - protein, 15 aa, synthetic construct
  REGION 1..15: note = Description of Artificial Sequence: Synthetic peptide
ARERWDSSSSALYFD

SEQ ID NO: 2300 - protein, 10 aa, synthetic construct
  REGION 1..10: note = Description of Artificial Sequence: Synthetic peptide
IGADYDIKWY

SEQ ID NO: 2301 - protein, 10 aa, synthetic construct
  REGION 1..10: note = Description of Artificial Sequence: Synthetic peptide
LLIYGNSNRP

SEQ ID NO: 2302 - protein, 11 aa, synthetic construct
  REGION 1..11: note = Description of Artificial Sequence: Synthetic peptide
QSYDSSMSGYV

SEQ ID NO: 2303 - protein, 8 aa, synthetic construct
  REGION 1..8: note = Description of Artificial Sequence: Synthetic peptide
GDSISGYY

SEQ ID NO: 2304 - protein, 7 aa, synthetic construct
  REGION 1..7: note = Description of Artificial Sequence: Synthetic peptide
IFTTGNT

SEQ ID NO: 2305 - protein, 16 aa, synthetic construct
  REGION 1..16: note = Description of Artificial Sequence: Synthetic peptide
ARERWDSSSSALYFDY

SEQ ID NO: 2306 - protein, 9 aa, synthetic construct
  REGION 1..9: note = Description of Artificial Sequence: Synthetic peptide
SSNIGADYD

SEQ ID NO: 2307 - skipped

SEQ ID NO: 2308 - protein, 12 aa, synthetic construct
  REGION 1..12: note = Description of Artificial Sequence: Synthetic peptide
QSYDSSMSGYVV

SEQ ID NO: 2309 - protein, 122 aa, synthetic construct
  REGION 1..122: note = Description of Artificial Sequence: Synthetic polypeptide
QVQLQESGPGLVKPSETLSLTCTVSGDSISGYYWNYIRQPAGKGLDWIGRIFTTGNTNYNPSLKSRVTMSVDTSKNQFSLKLTSVTAADTAVYYCARERWDSSSSALYFDYWGQGTLVTVSS

SEQ ID NO: 2310 - protein, 112 aa, synthetic construct
  REGION 1..112: note = Description of Artificial Sequence: Synthetic polypeptide
QSVLTQPPSVSGAPGQRVTISCTGSSSNIGADYDIKWYQQLPGTAPKLLIYGNSNRPSGVPDRFSGSKSGTSVSLAITGLQAEDEADYYCQSYDSSMSGYVVFGGGTKLTVL

SEQ ID NO: 2311 - protein, 452 aa, synthetic construct
  REGION 1..452: note = Description of Artificial Sequence: Synthetic polypeptide
QVQLQESGPGLVKPSETLSLTCTVSGDSISGYYWNYIRQPAGKGLDWIGRIFTTGNTNYNPSLKSRVTMSVDTSKNQFSLKLTSVTAADTAVYYCARERWDSSSSALYFDYWGQGTLVTVSSASTKGPSVFPLAPSSKSTSGGTAALGCLVKDYFPEPVTVSWNSGALTSGVHTFPAVLQSSGLYSLSSVVTVPSSSLGTQTYICNVNHKPSNTKVDKKVEPKSCDKTHTCPPCPAPELLGGPSVFLFPPKPKDTLMISRTPEVTCVVVDVSHEDPEVKFNWYVDGVEVHNAKTKPREEQYNSTYRVVSVLTVLHQDWLNGKEYKCKVSNKALPAPIEKTISKAKGQPREPQVYTLPPSREEMTKNQVSLTCLVKGFYPSDIAVEWESNGQPENNYKTTPPVLDSDGSFFLYSKLTVDKSRWQQGNVFSCSVMHEALHNHYTQKSLSLSPGK

SEQ ID NO: 2312 - protein, 218 aa, synthetic construct
  REGION 1..218: note = Description of Artificial Sequence: Synthetic polypeptide
QSVLTQPPSVSGAPGQRVTISCTGSSSNIGADYDIKWYQQLPGTAPKLLIYGNSNRPSGVPDRFSGSKSGTSVSLAITGLQAEDEADYYCQSYDSSMSGYVVFGGGTKLTVLGQPKAAPSVTLFPPSSEELQANKATLVCLISDFYPGAVTVAWKADSSPVKAGVETTTPSKQSNNKYAASSYLSLTPEQWKSHRSYSCQVTHEGSTVEKTVAPTECS

SEQ ID NO: 2313 - protein, 5 aa, synthetic construct
  REGION 1..5: note = Description of Artificial Sequence: Synthetic peptide
GYFWN

SEQ ID NO: 2314 - protein, 16 aa, synthetic construct
  REGION 1..16: note = Description of Artificial Sequence: Synthetic peptide
YIFYSGSTNYNPSLKS

SEQ ID NO: 2315 - protein, 12 aa, synthetic construct
  REGION 1..12: note = Description of Artificial Sequence: Synthetic peptide
LGKWELRTAFDI

SEQ ID NO: 2316 - protein, 13 aa, synthetic construct
  REGION 1..13: note = Description of Artificial Sequence: Synthetic peptide
SGSTSNIGSDTVN

SEQ ID NO: 2317 - protein, 7 aa, synthetic construct
  REGION 1..7: note = Description of Artificial Sequence: Synthetic peptide
SNNQRPS

SEQ ID NO: 2318 - protein, 11 aa, synthetic construct
  REGION 1..11: note = Description of Artificial Sequence: Synthetic peptide
AAWDDSLNGPV

SEQ ID NO: 2319 - protein, 7 aa, synthetic construct
  REGION 1..7: note = Description of Artificial Sequence: Synthetic peptide
NGSISGY

SEQ ID NO: 2320 - protein, 5 aa, synthetic construct
  REGION 1..5: note = Description of Artificial Sequence: Synthetic peptide
FYSGS

SEQ ID NO: 2321 - protein, 11 aa, synthetic construct
  REGION 1..11: note = Description of Artificial Sequence: Synthetic peptide
LGKWELRTAFD

SEQ ID NO: 2322 - protein, 9 aa, synthetic construct
  REGION 1..9: note = Description of Artificial Sequence: Synthetic peptide
STSNIGSDT

SEQ ID NO: 2323 - skipped

SEQ ID NO: 2324 - protein, 8 aa, synthetic construct
  REGION 1..8: note = Description of Artificial Sequence: Synthetic peptide
WDDSLNGP

SEQ ID NO: 2325 - protein, 10 aa, synthetic construct
  REGION 1..10: note = Description of Artificial Sequence: Synthetic peptide
NGSISGYFWN

SEQ ID NO: 2326 - protein, 9 aa, synthetic construct
  REGION 1..9: note = Description of Artificial Sequence: Synthetic peptide
YIFYSGSTN

SEQ ID NO: 2327 - protein, 12 aa, synthetic construct
  REGION 1..12: note = Description of Artificial Sequence: Synthetic peptide
LGKWELRTAFDI

SEQ ID NO: 2328 - protein, 13 aa, synthetic construct
  REGION 1..13: note = Description of Artificial Sequence: Synthetic peptide
SGSTSNIGSDTVN

SEQ ID NO: 2329 - protein, 7 aa, synthetic construct
  REGION 1..7: note = Description of Artificial Sequence: Synthetic peptide
SNNQRPS

SEQ ID NO: 2330 - protein, 11 aa, synthetic construct
  REGION 1..11: note = Description of Artificial Sequence: Synthetic peptide
AAWDDSLNGPV

SEQ ID NO: 2331 - protein, 6 aa, synthetic construct
  REGION 1..6: note = Description of Artificial Sequence: Synthetic peptide
SGYFWN

SEQ ID NO: 2332 - protein, 12 aa, synthetic construct
  REGION 1..12: note = Description of Artificial Sequence: Synthetic peptide
WIGYIFYSGSTN

SEQ ID NO: 2333 - protein, 13 aa, synthetic construct
  REGION 1..13: note = Description of Artificial Sequence: Synthetic peptide
AKLGKWELRTAFD

SEQ ID NO: 2334 - protein, 9 aa, synthetic construct
  REGION 1..9: note = Description of Artificial Sequence: Synthetic peptide
IGSDTVNWY

SEQ ID NO: 2335 - protein, 10 aa, synthetic construct
  REGION 1..10: note = Description of Artificial Sequence: Synthetic peptide
LLIYSNNQRP

SEQ ID NO: 2336 - protein, 10 aa, synthetic construct
  REGION 1..10: note = Description of Artificial Sequence: Synthetic peptide
AAWDDSLNGP

SEQ ID NO: 2337 - protein, 8 aa, synthetic construct
  REGION 1..8: note = Description of Artificial Sequence: Synthetic peptide
NGSISGYF

SEQ ID NO: 2338 - protein, 7 aa, synthetic construct
  REGION 1..7: note = Description of Artificial Sequence: Synthetic peptide
IFYSGST

SEQ ID NO: 2339 - protein, 14 aa, synthetic construct
  REGION 1..14: note = Description of Artificial Sequence: Synthetic peptide
AKLGKWELRTAFDI

SEQ ID NO: 2340 - protein, 8 aa, synthetic construct
  REGION 1..8: note = Description of Artificial Sequence: Synthetic peptide
TSNIGSDT

SEQ ID NO: 2341 - skipped

SEQ ID NO: 2342 - protein, 11 aa, synthetic construct
  REGION 1..11: note = Description of Artificial Sequence: Synthetic peptide
AAWDDSLNGPV

SEQ ID NO: 2343 - protein, 120 aa, synthetic construct
  REGION 1..120: note = Description of Artificial Sequence: Synthetic polypeptide
QVQLQESGPGLMKPSETLSLTCTVSNGSISGYFWNWIRQPPGKGLEWIGYIFYSGSTNYNPSLKSRVTISVDTSKNLVSLKLNSVTAADTAVYFCAKLGKWELRTAFDIWGQGTMVTVSS

SEQ ID NO: 2344 - protein, 110 aa, synthetic construct
  REGION 1..110: note = Description of Artificial Sequence: Synthetic polypeptide
QLVLTQPPSASGTPGQRVTISCSGSTSNIGSDTVNWYQQLPGTAPKLLIYSNNQRPSGVPDRFSGSKSGTSASLAISGLQSEDETDYYCAAWDDSLNGPVFGGGTKVTVL

SEQ ID NO: 2345 - protein, 450 aa, synthetic construct
  REGION 1..450: note = Description of Artificial Sequence: Synthetic polypeptide
QVQLQESGPGLMKPSETLSLTCTVSNGSISGYFWNWIRQPPGKGLEWIGYIFYSGSTNYNPSLKSRVTISVDTSKNLVSLKLNSVTAADTAVYFCAKLGKWELRTAFDIWGQGTMVTVSSASTKGPSVFPLAPSSKSTSGGTAALGCLVKDYFPEPVTVSWNSGALTSGVHTFPAVLQSSGLYSLSSVVTVPSSSLGTQTYICNVNHKPSNTKVDKKVEPKSCDKTHTCPPCPAPELLGGPSVFLFPPKPKDTLMISRTPEVTCVVVDVSHEDPEVKFNWYVDGVEVHNAKTKPREEQYNSTYRVVSVLTVLHQDWLNGKEYKCKVSNKALPAPIEKTISKAKGQPREPQVYTLPPSREEMTKNQVSLTCLVKGFYPSDIAVEWESNGQPENNYKTTPPVLDSDGSFFLYSKLTVDKSRWQQGNVFSCSVMHEALHNHYTQKSLSLSPGK

SEQ ID NO: 2346 - protein, 216 aa, synthetic construct
  REGION 1..216: note = Description of Artificial Sequence: Synthetic polypeptide
QLVLTQPPSASGTPGQRVTISCSGSTSNIGSDTVNWYQQLPGTAPKLLIYSNNQRPSGVPDRFSGSKSGTSASLAISGLQSEDETDYYCAAWDDSLNGPVFGGGTKVTVLGQPKAAPSVTLFPPSSEELQANKATLVCLISDFYPGAVTVAWKADSSPVKAGVETTTPSKQSNNKYAASSYLSLTPEQWKSHRSYSCQVTHEGSTVEKTVAPTECS

SEQ ID NO: 2347 - protein, 5 aa, synthetic construct
  REGION 1..5: note = Description of Artificial Sequence: Synthetic peptide
GYFWN

SEQ ID NO: 2348 - protein, 16 aa, synthetic construct
  REGION 1..16: note = Description of Artificial Sequence: Synthetic peptide
YIFYSGSTNYNPSLKS

SEQ ID NO: 2349 - protein, 12 aa, synthetic construct
  REGION 1..12: note = Description of Artificial Sequence: Synthetic peptide
LGKWELRTAFDI

SEQ ID NO: 2350 - protein, 11 aa, synthetic construct
  REGION 1..11: note = Description of Artificial Sequence: Synthetic peptide
SGDKLGDKYAC

SEQ ID NO: 2351 - protein, 7 aa, synthetic construct
  REGION 1..7: note = Description of Artificial Sequence: Synthetic peptide
QDSKRPS

SEQ ID NO: 2352 - protein, 9 aa, synthetic construct
  REGION 1..9: note = Description of Artificial Sequence: Synthetic peptide
QAWDSSTVV

SEQ ID NO: 2353 - protein, 7 aa, synthetic construct
  REGION 1..7: note = Description of Artificial Sequence: Synthetic peptide
NGSISGY

SEQ ID NO: 2354 - protein, 5 aa, synthetic construct
  REGION 1..5: note = Description of Artificial Sequence: Synthetic peptide
FYSGS

SEQ ID NO: 2355 - protein, 11 aa, synthetic construct
  REGION 1..11: note = Description of Artificial Sequence: Synthetic peptide
LGKWELRTAFD

SEQ ID NO: 2356 - protein, 7 aa, synthetic construct
  REGION 1..7: note = Description of Artificial Sequence: Synthetic peptide
DKLGDKY

SEQ ID NO: 2357 - skipped

SEQ ID NO: 2358 - protein, 6 aa, synthetic construct
  REGION 1..6: note = Description of Artificial Sequence: Synthetic peptide
WDSSTV

SEQ ID NO: 2359 - protein, 10 aa, synthetic construct
  REGION 1..10: note = Description of Artificial Sequence: Synthetic peptide
NGSISGYFWN

SEQ ID NO: 2360 - protein, 9 aa, synthetic construct
  REGION 1..9: note = Description of Artificial Sequence: Synthetic peptide
YIFYSGSTN

SEQ ID NO: 2361 - protein, 12 aa, synthetic construct
  REGION 1..12: note = Description of Artificial Sequence: Synthetic peptide
LGKWELRTAFDI

SEQ ID NO: 2362 - protein, 11 aa, synthetic construct
  REGION 1..11: note = Description of Artificial Sequence: Synthetic peptide
SGDKLGDKYAC

SEQ ID NO: 2363 - protein, 7 aa, synthetic construct
  REGION 1..7: note = Description of Artificial Sequence: Synthetic peptide
QDSKRPS

SEQ ID NO: 2364 - protein, 9 aa, synthetic construct
  REGION 1..9: note = Description of Artificial Sequence: Synthetic peptide
QAWDSSTVV

SEQ ID NO: 2365 - protein, 6 aa, synthetic construct
  REGION 1..6: note = Description of Artificial Sequence: Synthetic peptide
SGYFWN

SEQ ID NO: 2366 - protein, 12 aa, synthetic construct
  REGION 1..12: note = Description of Artificial Sequence: Synthetic peptide
WIGYIFYSGSTN

SEQ ID NO: 2367 - protein, 13 aa, synthetic construct
  REGION 1..13: note = Description of Artificial Sequence: Synthetic peptide
AKLGKWELRTAFD

SEQ ID NO: 2368 - protein, 7 aa, synthetic construct
  REGION 1..7: note = Description of Artificial Sequence: Synthetic peptide
DKYACWY

SEQ ID NO: 2369 - protein, 10 aa, synthetic construct
  REGION 1..10: note = Description of Artificial Sequence: Synthetic peptide
LVIYQDSKRP

SEQ ID NO: 2370 - protein, 8 aa, synthetic construct
  REGION 1..8: note = Description of Artificial Sequence: Synthetic peptide
QAWDSSTV

SEQ ID NO: 2371 - protein, 8 aa, synthetic construct
  REGION 1..8: note = Description of Artificial Sequence: Synthetic peptide
NGSISGYF

SEQ ID NO: 2372 - protein, 7 aa, synthetic construct
  REGION 1..7: note = Description of Artificial Sequence: Synthetic peptide
IFYSGST

SEQ ID NO: 2373 - protein, 14 aa, synthetic construct
  REGION 1..14: note = Description of Artificial Sequence: Synthetic peptide
AKLGKWELRTAFDI

SEQ ID NO: 2374 - protein, 6 aa, synthetic construct
  REGION 1..6: note = Description of Artificial Sequence: Synthetic peptide
KLGDKY

SEQ ID NO: 2375 - skipped

SEQ ID NO: 2376 - protein, 9 aa, synthetic construct
  REGION 1..9: note = Description of Artificial Sequence: Synthetic peptide
QAWDSSTVV

SEQ ID NO: 2377 - protein, 120 aa, synthetic construct
  REGION 1..120: note = Description of Artificial Sequence: Synthetic polypeptide
QVQLVQSGPGLMKPSETLSLTCTVSNGSISGYFWNWIRQPPGKGLEWIGYIFYSGSTNYNPSLKSRVTISVDTSKNLVSLKLNSVTAADTAVYFCAKLGKWELRTAFDIWGQGTMVTVSS

SEQ ID NO: 2378 - protein, 106 aa, synthetic construct
  REGION 1..106: note = Description of Artificial Sequence: Synthetic polypeptide
SSELTQPPSVSVSPGQTASITCSGDKLGDKYACWYQQKPGQSPVLVIYQDSKRPSGIPERFSGSNSGNTATLTISGTQAMDEADYYCQAWDSSTVVFGGGTKLTVL

SEQ ID NO: 2379 - protein, 450 aa, synthetic construct
  REGION 1..450: note = Description of Artificial Sequence: Synthetic polypeptide
QVQLVQSGPGLMKPSETLSLTCTVSNGSISGYFWNWIRQPPGKGLEWIGYIFYSGSTNYNPSLKSRVTISVDTSKNLVSLKLNSVTAADTAVYFCAKLGKWELRTAFDIWGQGTMVTVSSASTKGPSVFPLAPSSKSTSGGTAALGCLVKDYFPEPVTVSWNSGALTSGVHTFPAVLQSSGLYSLSSVVTVPSSSLGTQTYICNVNHKPSNTKVDKKVEPKSCDKTHTCPPCPAPELLGGPSVFLFPPKPKDTLMISRTPEVTCVVVDVSHEDPEVKFNWYVDGVEVHNAKTKPREEQYNSTYRVVSVLTVLHQDWLNGKEYKCKVSNKALPAPIEKTISKAKGQPREPQVYTLPPSREEMTKNQVSLTCLVKGFYPSDIAVEWESNGQPENNYKTTPPVLDSDGSFFLYSKLTVDKSRWQQGNVFSCSVMHEALHNHYTQKSLSLSPGK

SEQ ID NO: 2380 - protein, 212 aa, synthetic construct
  REGION 1..212: note = Description of Artificial Sequence: Synthetic polypeptide
SSELTQPPSVSVSPGQTASITCSGDKLGDKYACWYQQKPGQSPVLVIYQDSKRPSGIPERFSGSNSGNTATLTISGTQAMDEADYYCQAWDSSTVVFGGGTKLTVLGQPKAAPSVTLFPPSSEELQANKATLVCLISDFYPGAVTVAWKADSSPVKAGVETTTPSKQSNNKYAASSYLSLTPEQWKSHRSYSCQVTHEGSTVEKTVAPTECS

SEQ ID NO: 2381 - protein, 5 aa, synthetic construct
  REGION 1..5: note = Description of Artificial Sequence: Synthetic peptide
SSYWS

SEQ ID NO: 2382 - protein, 16 aa, synthetic construct
  REGION 1..16: note = Description of Artificial Sequence: Synthetic peptide
RFYSSGSTSYNPSLKS

SEQ ID NO: 2383 - protein, 10 aa, synthetic construct
  REGION 1..10: note = Description of Artificial Sequence: Synthetic peptide
YSGSYWYFDL

SEQ ID NO: 2384 - protein, 11 aa, synthetic construct
  REGION 1..11: note = Description of Artificial Sequence: Synthetic peptide
RASQSVSSYLA

SEQ ID NO: 2385 - protein, 7 aa, synthetic construct
  REGION 1..7: note = Description of Artificial Sequence: Synthetic peptide
DTSNRAT

SEQ ID NO: 2386 - protein, 9 aa, synthetic construct
  REGION 1..9: note = Description of Artificial Sequence: Synthetic peptide
QQRSDWLLT

SEQ ID NO: 2387 - protein, 7 aa, synthetic construct
  REGION 1..7: note = Description of Artificial Sequence: Synthetic peptide
GDSISSS

SEQ ID NO: 2388 - protein, 5 aa, synthetic construct
  REGION 1..5: note = Description of Artificial Sequence: Synthetic peptide
YSSGS

SEQ ID NO: 2389 - protein, 9 aa, synthetic construct
  REGION 1..9: note = Description of Artificial Sequence: Synthetic peptide
YSGSYWYFD

SEQ ID NO: 2390 - protein, 7 aa, synthetic construct
  REGION 1..7: note = Description of Artificial Sequence: Synthetic peptide
SQSVSSY

SEQ ID NO: 2391 - skipped

SEQ ID NO: 2392 - protein, 6 aa, synthetic construct
  REGION 1..6: note = Description of Artificial Sequence: Synthetic peptide
RSDWLL

SEQ ID NO: 2393 - protein, 10 aa, synthetic construct
  REGION 1..10: note = Description of Artificial Sequence: Synthetic peptide
GDSISSSYWS

SEQ ID NO: 2394 - protein, 9 aa, synthetic construct
  REGION 1..9: note = Description of Artificial Sequence: Synthetic peptide
RFYSSGSTS

SEQ ID NO: 2395 - protein, 10 aa, synthetic construct
  REGION 1..10: note = Description of Artificial Sequence: Synthetic peptide
YSGSYWYFDL

SEQ ID NO: 2396 - protein, 11 aa, synthetic construct
  REGION 1..11: note = Description of Artificial Sequence: Synthetic peptide
RASQSVSSYLA

SEQ ID NO: 2397 - protein, 7 aa, synthetic construct
  REGION 1..7: note = Description of Artificial Sequence: Synthetic peptide
DTSNRAT

SEQ ID NO: 2398 - protein, 9 aa, synthetic construct
  REGION 1..9: note = Description of Artificial Sequence: Synthetic peptide
QQRSDWLLT

SEQ ID NO: 2399 - protein, 6 aa, synthetic construct
  REGION 1..6: note = Description of Artificial Sequence: Synthetic peptide
SSSYWS

SEQ ID NO: 2400 - protein, 12 aa, synthetic construct
  REGION 1..12: note = Description of Artificial Sequence: Synthetic peptide
CIGRFYSSGSTS

SEQ ID NO: 2401 - protein, 11 aa, synthetic construct
  REGION 1..11: note = Description of Artificial Sequence: Synthetic peptide
ARYSGSYWYFD

SEQ ID NO: 2402 - protein, 7 aa, synthetic construct
  REGION 1..7: note = Description of Artificial Sequence: Synthetic peptide
SSYLAWY

SEQ ID NO: 2403 - protein, 10 aa, synthetic construct
  REGION 1..10: note = Description of Artificial Sequence: Synthetic peptide
LLIYDTSNRA

SEQ ID NO: 2404 - protein, 8 aa, synthetic construct
  REGION 1..8: note = Description of Artificial Sequence: Synthetic peptide
QQRSDWLL

SEQ ID NO: 2405 - protein, 8 aa, synthetic construct
  REGION 1..8: note = Description of Artificial Sequence: Synthetic peptide
GDSISSSY

SEQ ID NO: 2406 - protein, 7 aa, synthetic construct
  REGION 1..7: note = Description of Artificial Sequence: Synthetic peptide
FYSSGST

SEQ ID NO: 2407 - protein, 12 aa, synthetic construct
  REGION 1..12: note = Description of Artificial Sequence: Synthetic peptide
ARYSGSYWYFDL

SEQ ID NO: 2408 - protein, 6 aa, synthetic construct
  REGION 1..6: note = Description of Artificial Sequence: Synthetic peptide
QSVSSY

SEQ ID NO: 2409 - skipped

SEQ ID NO: 2410 - protein, 9 aa, synthetic construct
  REGION 1..9: note = Description of Artificial Sequence: Synthetic peptide
QQRSDWLLT

SEQ ID NO: 2411 - protein, 118 aa, synthetic construct
  REGION 1..118: note = Description of Artificial Sequence: Synthetic polypeptide
QVQLQESGPGLVKPSETLSLTCTVSGDSISSSYWSWIRQPAGKGLECIGRFYSSGSTSYNPSLKSRVTMAIDTSKNQFSLKLTSVTAADTAVYYCARYSGSYWYFDLWGRGTTVTVSS

SEQ ID NO: 2412 - protein, 107 aa, synthetic construct
  REGION 1..107: note = Description of Artificial Sequence: Synthetic polypeptide
EIVLTQSPATLSLSPGERATLSCRASQSVSSYLAWYQQRPGQAPRLLIYDTSNRATGIPARFSGSGSGTDFTLTISSLAPEDFAVYYCQQRSDWLLTFGGGTKVEIK

SEQ ID NO: 2413 - protein, 448 aa, synthetic construct
  REGION 1..448: note = Description of Artificial Sequence: Synthetic polypeptide
QVQLQESGPGLVKPSETLSLTCTVSGDSISSSYWSWIRQPAGKGLECIGRFYSSGSTSYNPSLKSRVTMAIDTSKNQFSLKLTSVTAADTAVYYCARYSGSYWYFDLWGRGTTVTVSSASTKGPSVFPLAPSSKSTSGGTAALGCLVKDYFPEPVTVSWNSGALTSGVHTFPAVLQSSGLYSLSSVVTVPSSSLGTQTYICNVNHKPSNTKVDKKVEPKSCDKTHTCPPCPAPELLGGPSVFLFPPKPKDTLMISRTPEVTCVVVDVSHEDPEVKFNWYVDGVEVHNAKTKPREEQYNSTYRVVSVLTVLHQDWLNGKEYKCKVSNKALPAPIEKTISKAKGQPREPQVYTLPPSREEMTKNQVSLTCLVKGFYPSDIAVEWESNGQPENNYKTTPPVLDSDGSFFLYSKLTVDKSRWQQGNVFSCSVMHEALHNHYTQKSLSLSPGK

SEQ ID NO: 2414 - protein, 214 aa, synthetic construct
  REGION 1..214: note = Description of Artificial Sequence: Synthetic polypeptide
EIVLTQSPATLSLSPGERATLSCRASQSVSSYLAWYQQRPGQAPRLLIYDTSNRATGIPARFSGSGSGTDFTLTISSLAPEDFAVYYCQQRSDWLLTFGGGTKVEIKRTVAAPSVFIFPPSDEQLKSGTASVVCLLNNFYPREAKVQWKVDNALQSGNSQESVTEQDSKDSTYSLSSTLTLSKADYEKHKVYACEVTHQGLSSPVTKSFNRGEC

SEQ ID NO: 2415 - protein, 5 aa, synthetic construct
  REGION 1..5: note = Description of Artificial Sequence: Synthetic peptide
YYFWN

SEQ ID NO: 2416 - protein, 16 aa, synthetic construct
  REGION 1..16: note = Description of Artificial Sequence: Synthetic peptide
YIYYSGSTNYNPSLKS

SEQ ID NO: 2417 - protein, 12 aa, synthetic construct
  REGION 1..12: note = Description of Artificial Sequence: Synthetic peptide
EGKWELRTTFDI

SEQ ID NO: 2418 - protein, 13 aa, synthetic construct
  REGION 1..13: note = Description of Artificial Sequence: Synthetic peptide
SGSSSNIGSNTVN

SEQ ID NO: 2419 - protein, 7 aa, synthetic construct
  REGION 1..7: note = Description of Artificial Sequence: Synthetic peptide
SNNQRPS

SEQ ID NO: 2420 - protein, 11 aa, synthetic construct
  REGION 1..11: note = Description of Artificial Sequence: Synthetic peptide
AAWDDSLNGPV

SEQ ID NO: 2421 - protein, 7 aa, synthetic construct
  REGION 1..7: note = Description of Artificial Sequence: Synthetic peptide
GGSISYY

SEQ ID NO: 2422 - protein, 5 aa, synthetic construct
  REGION 1..5: note = Description of Artificial Sequence: Synthetic peptide
YYSGS

SEQ ID NO: 2423 - protein, 11 aa, synthetic construct
  REGION 1..11: note = Description of Artificial Sequence: Synthetic peptide
EGKWELRTTFD

SEQ ID NO: 2424 - protein, 9 aa, synthetic construct
  REGION 1..9: note = Description of Artificial Sequence: Synthetic peptide
SSSNIGSNT

SEQ ID NO: 2425 - skipped

SEQ ID NO: 2426 - protein, 8 aa, synthetic construct
  REGION 1..8: note = Description of Artificial Sequence: Synthetic peptide
WDDSLNGP

SEQ ID NO: 2427 - protein, 10 aa, synthetic construct
  REGION 1..10: note = Description of Artificial Sequence: Synthetic peptide
GGSISYYFWN

SEQ ID NO: 2428 - protein, 9 aa, synthetic construct
  REGION 1..9: note = Description of Artificial Sequence: Synthetic peptide
YIYYSGSTN

SEQ ID NO: 2429 - protein, 12 aa, synthetic construct
  REGION 1..12: note = Description of Artificial Sequence: Synthetic peptide
EGKWELRTTFDI

SEQ ID NO: 2430 - protein, 13 aa, synthetic construct
  REGION 1..13: note = Description of Artificial Sequence: Synthetic peptide
SGSSSNIGSNTVN

SEQ ID NO: 2431 - protein, 7 aa, synthetic construct
  REGION 1..7: note = Description of Artificial Sequence: Synthetic peptide
SNNQRPS

SEQ ID NO: 2432 - protein, 11 aa, synthetic construct
  REGION 1..11: note = Description of Artificial Sequence: Synthetic peptide
AAWDDSLNGPV

SEQ ID NO: 2433 - protein, 6 aa, synthetic construct
  REGION 1..6: note = Description of Artificial Sequence: Synthetic peptide
SYYFWN

SEQ ID NO: 2434 - protein, 12 aa, synthetic construct
  REGION 1..12: note = Description of Artificial Sequence: Synthetic peptide
WIGYIYYSGSTN

SEQ ID NO: 2435 - protein, 13 aa, synthetic construct
  REGION 1..13: note = Description of Artificial Sequence: Synthetic peptide
AREGKWELRTTFD

SEQ ID NO: 2436 - protein, 9 aa, synthetic construct
  REGION 1..9: note = Description of Artificial Sequence: Synthetic peptide
IGSNTVNWY

SEQ ID NO: 2437 - protein, 10 aa, synthetic construct
  REGION 1..10: note = Description of Artificial Sequence: Synthetic peptide
LLIYSNNQRP

SEQ ID NO: 2438 - protein, 10 aa, synthetic construct
  REGION 1..10: note = Description of Artificial Sequence: Synthetic peptide
AAWDDSLNGP

SEQ ID NO: 2439 - protein, 8 aa, synthetic construct
  REGION 1..8: note = Description of Artificial Sequence: Synthetic peptide
GGSISYYF

SEQ ID NO: 2440 - protein, 7 aa, synthetic construct
  REGION 1..7: note = Description of Artificial Sequence: Synthetic peptide
IYYSGST

SEQ ID NO: 2441 - protein, 14 aa, synthetic construct
  REGION 1..14: note = Description of Artificial Sequence: Synthetic peptide
AREGKWELRTTFDI

SEQ ID NO: 2442 - protein, 8 aa, synthetic construct
  REGION 1..8: note = Description of Artificial Sequence: Synthetic peptide
SSNIGSNT

SEQ ID NO: 2443 - skipped

SEQ ID NO: 2444 - protein, 11 aa, synthetic construct
  REGION 1..11: note = Description of Artificial Sequence: Synthetic peptide
AAWDDSLNGPV

SEQ ID NO: 2445 - protein, 120 aa, synthetic construct
  REGION 1..120: note = Description of Artificial Sequence: Synthetic polypeptide
QVQLQESGPGLVKPSETLSLTCTVSGGSISYYFWNWIRQPPGKGLEWIGYIYYSGSTNYNPSLKSRVTISLDTSKNQFSLKLSSVTAADTAVYYCAREGKWELRTTFDIWGQGTMVTVSS

SEQ ID NO: 2446 - protein, 110 aa, synthetic construct
  REGION 1..110: note = Description of Artificial Sequence: Synthetic polypeptide
QSALTQPPSASGTPGQRVTISCSGSSSNIGSNTVNWYQQLPGTAPKLLIYSNNQRPSGVPDRFSGSKSGTSASLAISGLQSEDEADYYCAAWDDSLNGPVFGGGTKLTVL

SEQ ID NO: 2447 - protein, 450 aa, synthetic construct
  REGION 1..450: note = Description of Artificial Sequence: Synthetic polypeptide
QVQLQESGPGLVKPSETLSLTCTVSGGSISYYFWNWIRQPPGKGLEWIGYIYYSGSTNYNPSLKSRVTISLDTSKNQFSLKLSSVTAADTAVYYCAREGKWELRTTFDIWGQGTMVTVSSASTKGPSVFPLAPSSKSTSGGTAALGCLVKDYFPEPVTVSWNSGALTSGVHTFPAVLQSSGLYSLSSVVTVPSSSLGTQTYICNVNHKPSNTKVDKKVEPKSCDKTHTCPPCPAPELLGGPSVFLFPPKPKDTLMISRTPEVTCVVVDVSHEDPEVKFNWYVDGVEVHNAKTKPREEQYNSTYRVVSVLTVLHQDWLNGKEYKCKVSNKALPAPIEKTISKAKGQPREPQVYTLPPSREEMTKNQVSLTCLVKGFYPSDIAVEWESNGQPENNYKTTPPVLDSDGSFFLYSKLTVDKSRWQQGNVFSCSVMHEALHNHYTQKSLSLSPGK

SEQ ID NO: 2448 - protein, 216 aa, synthetic construct
  REGION 1..216: note = Description of Artificial Sequence: Synthetic polypeptide
QSALTQPPSASGTPGQRVTISCSGSSSNIGSNTVNWYQQLPGTAPKLLIYSNNQRPSGVPDRFSGSKSGTSASLAISGLQSEDEADYYCAAWDDSLNGPVFGGGTKLTVLGQPKAAPSVTLFPPSSEELQANKATLVCLISDFYPGAVTVAWKADSSPVKAGVETTTPSKQSNNKYAASSYLSLTPEQWKSHRSYSCQVTHEGSTVEKTVAPTECS

SEQ ID NO: 2449 - protein, 5 aa, synthetic construct
  REGION 1..5: note = Description of Artificial Sequence: Synthetic peptide
SYYWS

SEQ ID NO: 2450 - protein, 16 aa, synthetic construct
  REGION 1..16: note = Description of Artificial Sequence: Synthetic peptide
RFYTGGRNNYNPSFKS

SEQ ID NO: 2451 - protein, 18 aa, synthetic construct
  REGION 1..18: note = Description of Artificial Sequence: Synthetic peptide
DMEYYYDRSGYSYWYFDL

SEQ ID NO: 2452 - protein, 11 aa, synthetic construct
  REGION 1..11: note = Description of Artificial Sequence: Synthetic peptide
GGNNIGSKSVH

SEQ ID NO: 2453 - protein, 7 aa, synthetic construct
  REGION 1..7: note = Description of Artificial Sequence: Synthetic peptide
DDSDRPS

SEQ ID NO: 2454 - protein, 11 aa, synthetic construct
  REGION 1..11: note = Description of Artificial Sequence: Synthetic peptide
QVWDSSSDHVV

SEQ ID NO: 2455 - protein, 7 aa, synthetic construct
  REGION 1..7: note = Description of Artificial Sequence: Synthetic peptide
GGSISSY

SEQ ID NO: 2456 - protein, 5 aa, synthetic construct
  REGION 1..5: note = Description of Artificial Sequence: Synthetic peptide
YTGGR

SEQ ID NO: 2457 - protein, 17 aa, synthetic construct
  REGION 1..17: note = Description of Artificial Sequence: Synthetic peptide
DMEYYYDRSGYSYWYFD

SEQ ID NO: 2458 - protein, 7 aa, synthetic construct
  REGION 1..7: note = Description of Artificial Sequence: Synthetic peptide
NNIGSKS

SEQ ID NO: 2459 - skipped

SEQ ID NO: 2460 - protein, 8 aa, synthetic construct
  REGION 1..8: note = Description of Artificial Sequence: Synthetic peptide
WDSSSDHV

SEQ ID NO: 2461 - protein, 10 aa, synthetic construct
  REGION 1..10: note = Description of Artificial Sequence: Synthetic peptide
GGSISSYYWS

SEQ ID NO: 2462 - protein, 9 aa, synthetic construct
  REGION 1..9: note = Description of Artificial Sequence: Synthetic peptide
RFYTGGRNN

SEQ ID NO: 2463 - protein, 18 aa, synthetic construct
  REGION 1..18: note = Description of Artificial Sequence: Synthetic peptide
DMEYYYDRSGYSYWYFDL

SEQ ID NO: 2464 - protein, 11 aa, synthetic construct
  REGION 1..11: note = Description of Artificial Sequence: Synthetic peptide
GGNNIGSKSVH

SEQ ID NO: 2465 - protein, 7 aa, synthetic construct
  REGION 1..7: note = Description of Artificial Sequence: Synthetic peptide
DDSDRPS

SEQ ID NO: 2466 - protein, 11 aa, synthetic construct
  REGION 1..11: note = Description of Artificial Sequence: Synthetic peptide
QVWDSSSDHVV

SEQ ID NO: 2467 - protein, 6 aa, synthetic construct
  REGION 1..6: note = Description of Artificial Sequence: Synthetic peptide
SSYYWS

SEQ ID NO: 2468 - protein, 12 aa, synthetic construct
  REGION 1..12: note = Description of Artificial Sequence: Synthetic peptide
WIGRFYTGGRNN

SEQ ID NO: 2469 - protein, 19 aa, synthetic construct
  REGION 1..19: note = Description of Artificial Sequence: Synthetic peptide
ARDMEYYYDRSGYSYWYFD

SEQ ID NO: 2470 - protein, 7 aa, synthetic construct
  REGION 1..7: note = Description of Artificial Sequence: Synthetic peptide
SKSVHWY

SEQ ID NO: 2471 - protein, 10 aa, synthetic construct
  REGION 1..10: note = Description of Artificial Sequence: Synthetic peptide
LVVYDDSDRP

SEQ ID NO: 2472 - protein, 10 aa, synthetic construct
  REGION 1..10: note = Description of Artificial Sequence: Synthetic peptide
QVWDSSSDHV

SEQ ID NO: 2473 - protein, 8 aa, synthetic construct
  REGION 1..8: note = Description of Artificial Sequence: Synthetic peptide
GGSISSYY

SEQ ID NO: 2474 - protein, 7 aa, synthetic construct
  REGION 1..7: note = Description of Artificial Sequence: Synthetic peptide
FYTGGRN

SEQ ID NO: 2475 - protein, 20 aa, synthetic construct
  REGION 1..20: note = Description of Artificial Sequence: Synthetic peptide
ARDMEYYYDRSGYSYWYFDL

SEQ ID NO: 2476 - protein, 6 aa, synthetic construct
  REGION 1..6: note = Description of Artificial Sequence: Synthetic peptide
NIGSKS

SEQ ID NO: 2477 - skipped

SEQ ID NO: 2478 - protein, 11 aa, synthetic construct
  REGION 1..11: note = Description of Artificial Sequence: Synthetic peptide
QVWDSSSDHVV

SEQ ID NO: 2479 - protein, 126 aa, synthetic construct
  REGION 1..126: note = Description of Artificial Sequence: Synthetic polypeptide
EVQLVQSGPGLVKPSETLSLTCTVSGGSISSYYWSWIRQPAGKGLEWIGRFYTGGRNNYNPSFKSRVTMSVDTSQNQFSLKLSSVTAADTAVYYCARDMEYYYDRSGYSYWYFDLWGRGTTVTVSS

SEQ ID NO: 2480 - protein, 108 aa, synthetic construct
  REGION 1..108: note = Description of Artificial Sequence: Synthetic polypeptide
SYELMQPPSVSVAPGQTARITCGGNNIGSKSVHWYQQKPGQAPVLVVYDDSDRPSGIPERFSGSNSGNTATLTISRVEAGDEADYYCQVWDSSSDHVVFGGGTKLTVL

SEQ ID NO: 2481 - protein, 456 aa, synthetic construct
  REGION 1..456: note = Description of Artificial Sequence: Synthetic polypeptide
EVQLVQSGPGLVKPSETLSLTCTVSGGSISSYYWSWIRQPAGKGLEWIGRFYTGGRNNYNPSFKSRVTMSVDTSQNQFSLKLSSVTAADTAVYYCARDMEYYYDRSGYSYWYFDLWGRGTTVTVSSASTKGPSVFPLAPSSKSTSGGTAALGCLVKDYFPEPVTVSWNSGALTSGVHTFPAVLQSSGLYSLSSVVTVPSSSLGTQTYICNVNHKPSNTKVDKKVEPKSCDKTHTCPPCPAPELLGGPSVFLFPPKPKDTLMISRTPEVTCVVVDVSHEDPEVKFNWYVDGVEVHNAKTKPREEQYNSTYRVVSVLTVLHQDWLNGKEYKCKVSNKALPAPIEKTISKAKGQPREPQVYTLPPSREEMTKNQVSLTCLVKGFYPSDIAVEWESNGQPENNYKTTPPVLDSDGSFFLYSKLTVDKSRWQQGNVFSCSVMHEALHNHYTQKSLSLSPGK

SEQ ID NO: 2482 - protein, 214 aa, synthetic construct
  REGION 1..214: note = Description of Artificial Sequence: Synthetic polypeptide
SYELMQPPSVSVAPGQTARITCGGNNIGSKSVHWYQQKPGQAPVLVVYDDSDRPSGIPERFSGSNSGNTATLTISRVEAGDEADYYCQVWDSSSDHVVFGGGTKLTVLGQPKAAPSVTLFPPSSEELQANKATLVCLISDFYPGAVTVAWKADSSPVKAGVETTTPSKQSNNKYAASSYLSLTPEQWKSHRSYSCQVTHEGSTVEKTVAPTECS

SEQ ID NO: 2483 - protein, 5 aa, synthetic construct
  REGION 1..5: note = Description of Artificial Sequence: Synthetic peptide
SYYWN

SEQ ID NO: 2484 - protein, 16 aa, synthetic construct
  REGION 1..16: note = Description of Artificial Sequence: Synthetic peptide
RIYTIGNTNYNPSLKS

SEQ ID NO: 2485 - protein, 17 aa, synthetic construct
  REGION 1..17: note = Description of Artificial Sequence: Synthetic peptide
EGYYESDGSFFPGAFNI

SEQ ID NO: 2486 - protein, 14 aa, synthetic construct
  REGION 1..14: note = Description of Artificial Sequence: Synthetic peptide
TGTSNDVGSYNLVS

SEQ ID NO: 2487 - protein, 7 aa, synthetic construct
  REGION 1..7: note = Description of Artificial Sequence: Synthetic peptide
AGSKRPS

SEQ ID NO: 2488 - protein, 10 aa, synthetic construct
  REGION 1..10: note = Description of Artificial Sequence: Synthetic peptide
CSYAGTTNVV

SEQ ID NO: 2489 - protein, 7 aa, synthetic construct
  REGION 1..7: note = Description of Artificial Sequence: Synthetic peptide
GGSITSY

SEQ ID NO: 2490 - protein, 5 aa, synthetic construct
  REGION 1..5: note = Description of Artificial Sequence: Synthetic peptide
YTIGN

SEQ ID NO: 2491 - protein, 16 aa, synthetic construct
  REGION 1..16: note = Description of Artificial Sequence: Synthetic peptide
EGYYESDGSFFPGAFN

SEQ ID NO: 2492 - protein, 10 aa, synthetic construct
  REGION 1..10: note = Description of Artificial Sequence: Synthetic peptide
TSNDVGSYNL

SEQ ID NO: 2493 - skipped

SEQ ID NO: 2494 - protein, 7 aa, synthetic construct
  REGION 1..7: note = Description of Artificial Sequence: Synthetic peptide
YAGTTNV

SEQ ID NO: 2495 - protein, 10 aa, synthetic construct
  REGION 1..10: note = Description of Artificial Sequence: Synthetic peptide
GGSITSYYWN

SEQ ID NO: 2496 - protein, 9 aa, synthetic construct
  REGION 1..9: note = Description of Artificial Sequence: Synthetic peptide
RIYTIGNTN

SEQ ID NO: 2497 - protein, 17 aa, synthetic construct
  REGION 1..17: note = Description of Artificial Sequence: Synthetic peptide
EGYYESDGSFFPGAFNI

SEQ ID NO: 2498 - protein, 14 aa, synthetic construct
  REGION 1..14: note = Description of Artificial Sequence: Synthetic peptide
TGTSNDVGSYNLVS

SEQ ID NO: 2499 - protein, 7 aa, synthetic construct
  REGION 1..7: note = Description of Artificial Sequence: Synthetic peptide
AGSKRPS

SEQ ID NO: 2500 - protein, 10 aa, synthetic construct
  REGION 1..10: note = Description of Artificial Sequence: Synthetic peptide
CSYAGTTNVV

SEQ ID NO: 2501 - protein, 6 aa, synthetic construct
  REGION 1..6: note = Description of Artificial Sequence: Synthetic peptide
TSYYWN

SEQ ID NO: 2502 - protein, 12 aa, synthetic construct
  REGION 1..12: note = Description of Artificial Sequence: Synthetic peptide
WIGRIYTIGNTN

SEQ ID NO: 2503 - protein, 18 aa, synthetic construct
  REGION 1..18: note = Description of Artificial Sequence: Synthetic peptide
AREGYYESDGSFFPGAFN

SEQ ID NO: 2504 - protein, 10 aa, synthetic construct
  REGION 1..10: note = Description of Artificial Sequence: Synthetic peptide
VGSYNLVSWY

SEQ ID NO: 2505 - protein, 10 aa, synthetic construct
  REGION 1..10: note = Description of Artificial Sequence: Synthetic peptide
LMIYAGSKRP

SEQ ID NO: 2506 - protein, 9 aa, synthetic construct
  REGION 1..9: note = Description of Artificial Sequence: Synthetic peptide
CSYAGTTNV

SEQ ID NO: 2507 - protein, 8 aa, synthetic construct
  REGION 1..8: note = Description of Artificial Sequence: Synthetic peptide
GGSITSYY

SEQ ID NO: 2508 - protein, 7 aa, synthetic construct
  REGION 1..7: note = Description of Artificial Sequence: Synthetic peptide
IYTIGNT

SEQ ID NO: 2509 - protein, 19 aa, synthetic construct
  REGION 1..19: note = Description of Artificial Sequence: Synthetic peptide
AREGYYESDGSFFPGAFNI

SEQ ID NO: 2510 - protein, 9 aa, synthetic construct
  REGION 1..9: note = Description of Artificial Sequence: Synthetic peptide
SNDVGSYNL

SEQ ID NO: 2511 - skipped

SEQ ID NO: 2512 - protein, 10 aa, synthetic construct
  REGION 1..10: note = Description of Artificial Sequence: Synthetic peptide
CSYAGTTNVV

SEQ ID NO: 2513 - protein, 125 aa, synthetic construct
  REGION 1..125: note = Description of Artificial Sequence: Synthetic polypeptide
QVQLQQSGPGLVKPSETLSLTCTVSGGSITSYYWNWIRQPAGKGLEWIGRIYTIGNTNYNPSLKSRVTMSIDTSKHQFSLKLSSVTGADTAVYYCAREGYYESDGSFFPGAFNIWGQGTMVTVSS

SEQ ID NO: 2514 - protein, 110 aa, synthetic construct
  REGION 1..110: note = Description of Artificial Sequence: Synthetic polypeptide
SSELTQPASVSGSPGQSITISCTGTSNDVGSYNLVSWYQQHPGKAPKLMIYAGSKRPSGISNRFSGSKSGNTASLTISGLQAEDEADYYCCSYAGTTNVVFGGGTKVTVL

SEQ ID NO: 2515 - protein, 455 aa, synthetic construct
  REGION 1..455: note = Description of Artificial Sequence: Synthetic polypeptide
QVQLQQSGPGLVKPSETLSLTCTVSGGSITSYYWNWIRQPAGKGLEWIGRIYTIGNTNYNPSLKSRVTMSIDTSKHQFSLKLSSVTGADTAVYYCAREGYYESDGSFFPGAFNIWGQGTMVTVSSASTKGPSVFPLAPSSKSTSGGTAALGCLVKDYFPEPVTVSWNSGALTSGVHTFPAVLQSSGLYSLSSVVTVPSSSLGTQTYICNVNHKPSNTKVDKKVEPKSCDKTHTCPPCPAPELLGGPSVFLFPPKPKDTLMISRTPEVTCVVVDVSHEDPEVKFNWYVDGVEVHNAKTKPREEQYNSTYRVVSVLTVLHQDWLNGKEYKCKVSNKALPAPIEKTISKAKGQPREPQVYTLPPSREEMTKNQVSLTCLVKGFYPSDIAVEWESNGQPENNYKTTPPVLDSDGSFFLYSKLTVDKSRWQQGNVFSCSVMHEALHNHYTQKSLSLSPGK

SEQ ID NO: 2516 - protein, 216 aa, synthetic construct
  REGION 1..216: note = Description of Artificial Sequence: Synthetic polypeptide
SSELTQPASVSGSPGQSITISCTGTSNDVGSYNLVSWYQQHPGKAPKLMIYAGSKRPSGISNRFSGSKSGNTASLTISGLQAEDEADYYCCSYAGTTNVVFGGGTKVTVLGQPKAAPSVTLFPPSSEELQANKATLVCLISDFYPGAVTVAWKADSSPVKAGVETTTPSKQSNNKYAASSYLSLTPEQWKSHRSYSCQVTHEGSTVEKTVAPTECS

SEQ ID NO: 2517 - protein, 5 aa, synthetic construct
  REGION 1..5: note = Description of Artificial Sequence: Synthetic peptide
GDYMH

SEQ ID NO: 2518 - protein, 17 aa, synthetic construct
  REGION 1..17: note = Description of Artificial Sequence: Synthetic peptide
WINPNSGYTNNAEKFQG

SEQ ID NO: 2519 - protein, 7 aa, synthetic construct
  REGION 1..7: note = Description of Artificial Sequence: Synthetic peptide
ELDALDV

SEQ ID NO: 2520 - protein, 14 aa, synthetic construct
  REGION 1..14: note = Description of Artificial Sequence: Synthetic peptide
TGTSSDVGGYNYVS

SEQ ID NO: 2521 - protein, 7 aa, synthetic construct
  REGION 1..7: note = Description of Artificial Sequence: Synthetic peptide
EVSKRPS

SEQ ID NO: 2522 - protein, 11 aa, synthetic construct
  REGION 1..11: note = Description of Artificial Sequence: Synthetic peptide
NSYAGSNNFEV

SEQ ID NO: 2523 - protein, 7 aa, synthetic construct
  REGION 1..7: note = Description of Artificial Sequence: Synthetic peptide
GYTFTGD

SEQ ID NO: 2524 - protein, 6 aa, synthetic construct
  REGION 1..6: note = Description of Artificial Sequence: Synthetic peptide
NPNSGY

SEQ ID NO: 2525 - protein, 6 aa, synthetic construct
  REGION 1..6: note = Description of Artificial Sequence: Synthetic peptide
ELDALD

SEQ ID NO: 2526 - protein, 10 aa, synthetic construct
  REGION 1..10: note = Description of Artificial Sequence: Synthetic peptide
TSSDVGGYNY

SEQ ID NO: 2527 - skipped

SEQ ID NO: 2528 - protein, 8 aa, synthetic construct
  REGION 1..8: note = Description of Artificial Sequence: Synthetic peptide
YAGSNNFE

SEQ ID NO: 2529 - protein, 10 aa, synthetic construct
  REGION 1..10: note = Description of Artificial Sequence: Synthetic peptide
GYTFTGDYMH

SEQ ID NO: 2530 - protein, 10 aa, synthetic construct
  REGION 1..10: note = Description of Artificial Sequence: Synthetic peptide
WINPNSGYTN

SEQ ID NO: 2531 - protein, 7 aa, synthetic construct
  REGION 1..7: note = Description of Artificial Sequence: Synthetic peptide
ELDALDV

SEQ ID NO: 2532 - protein, 14 aa, synthetic construct
  REGION 1..14: note = Description of Artificial Sequence: Synthetic peptide
TGTSSDVGGYNYVS

SEQ ID NO: 2533 - protein, 7 aa, synthetic construct
  REGION 1..7: note = Description of Artificial Sequence: Synthetic peptide
EVSKRPS

SEQ ID NO: 2534 - protein, 11 aa, synthetic construct
  REGION 1..11: note = Description of Artificial Sequence: Synthetic peptide
NSYAGSNNFEV

SEQ ID NO: 2535 - protein, 6 aa, synthetic construct
  REGION 1..6: note = Description of Artificial Sequence: Synthetic peptide
TGDYMH

SEQ ID NO: 2536 - protein, 13 aa, synthetic construct
  REGION 1..13: note = Description of Artificial Sequence: Synthetic peptide
WMGWINPNSGYTN

SEQ ID NO: 2537 - protein, 8 aa, synthetic construct
  REGION 1..8: note = Description of Artificial Sequence: Synthetic peptide
TRELDALD

SEQ ID NO: 2538 - protein, 10 aa, synthetic construct
  REGION 1..10: note = Description of Artificial Sequence: Synthetic peptide
VGGYNYVSWY

SEQ ID NO: 2539 - protein, 10 aa, synthetic construct
  REGION 1..10: note = Description of Artificial Sequence: Synthetic peptide
LMIYEVSKRP

SEQ ID NO: 2540 - protein, 10 aa, synthetic construct
  REGION 1..10: note = Description of Artificial Sequence: Synthetic peptide
NSYAGSNNFE

SEQ ID NO: 2541 - protein, 8 aa, synthetic construct
  REGION 1..8: note = Description of Artificial Sequence: Synthetic peptide
GYTFTGDY

SEQ ID NO: 2542 - protein, 8 aa, synthetic construct
  REGION 1..8: note = Description of Artificial Sequence: Synthetic peptide
INPNSGYT

SEQ ID NO: 2543 - protein, 9 aa, synthetic construct
  REGION 1..9: note = Description of Artificial Sequence: Synthetic peptide
TRELDALDV

SEQ ID NO: 2544 - protein, 9 aa, synthetic construct
  REGION 1..9: note = Description of Artificial Sequence: Synthetic peptide
SSDVGGYNY

SEQ ID NO: 2545 - skipped

SEQ ID NO: 2546 - protein, 11 aa, synthetic construct
  REGION 1..11: note = Description of Artificial Sequence: Synthetic peptide
NSYAGSNNFEV

SEQ ID NO: 2547 - protein, 116 aa, synthetic construct
  REGION 1..116: note = Description of Artificial Sequence: Synthetic polypeptide
EVQLLESGAEVKKPGASVKVSCKASGYTFTGDYMHWVRQAPGQGLEWMGWINPNSGYTNNAEKFQGRVTMTRDTSISTAYMELSRLSSDDTAVYYCTRELDALDVWGQGTMVTVSS

SEQ ID NO: 2548 - protein, 111 aa, synthetic construct
  REGION 1..111: note = Description of Artificial Sequence: Synthetic polypeptide
QSVLTQPPSASGSPGQSVTISCTGTSSDVGGYNYVSWYQQHPGKAPKLMIYEVSKRPSGVPDRFSGSKSGNTASLTVSGLQAEDEADYYCNSYAGSNNFEVFGGGTKVTVL

SEQ ID NO: 2549 - protein, 446 aa, synthetic construct
  REGION 1..446: note = Description of Artificial Sequence: Synthetic polypeptide
EVQLLESGAEVKKPGASVKVSCKASGYTFTGDYMHWVRQAPGQGLEWMGWINPNSGYTNNAEKFQGRVTMTRDTSISTAYMELSRLSSDDTAVYYCTRELDALDVWGQGTMVTVSSASTKGPSVFPLAPSSKSTSGGTAALGCLVKDYFPEPVTVSWNSGALTSGVHTFPAVLQSSGLYSLSSVVTVPSSSLGTQTYICNVNHKPSNTKVDKKVEPKSCDKTHTCPPCPAPELLGGPSVFLFPPKPKDTLMISRTPEVTCVVVDVSHEDPEVKFNWYVDGVEVHNAKTKPREEQYNSTYRVVSVLTVLHQDWLNGKEYKCKVSNKALPAPIEKTISKAKGQPREPQVYTLPPSREEMTKNQVSLTCLVKGFYPSDIAVEWESNGQPENNYKTTPPVLDSDGSFFLYSKLTVDKSRWQQGNVFSCSVMHEALHNHYTQKSLSLSPGK

SEQ ID NO: 2550 - protein, 217 aa, synthetic construct
  REGION 1..217: note = Description of Artificial Sequence: Synthetic polypeptide
QSVLTQPPSASGSPGQSVTISCTGTSSDVGGYNYVSWYQQHPGKAPKLMIYEVSKRPSGVPDRFSGSKSGNTASLTVSGLQAEDEADYYCNSYAGSNNFEVFGGGTKVTVLGQPKAAPSVTLFPPSSEELQANKATLVCLISDFYPGAVTVAWKADSSPVKAGVETTTPSKQSNNKYAASSYLSLTPEQWKSHRSYSCQVTHEGSTVEKTVAPTECS

SEQ ID NO: 2551 - protein, 5 aa, synthetic construct
  REGION 1..5: note = Description of Artificial Sequence: Synthetic peptide
NHFWS

SEQ ID NO: 2552 - protein, 16 aa, synthetic construct
  REGION 1..16: note = Description of Artificial Sequence: Synthetic peptide
FVFYNGNTNYNPSLKS

SEQ ID NO: 2553 - protein, 12 aa, synthetic construct
  REGION 1..12: note = Description of Artificial Sequence: Synthetic peptide
VGRWVLRTAFDI

SEQ ID NO: 2554 - protein, 13 aa, synthetic construct
  REGION 1..13: note = Description of Artificial Sequence: Synthetic peptide
SGSSSNIGSNTVN

SEQ ID NO: 2555 - protein, 7 aa, synthetic construct
  REGION 1..7: note = Description of Artificial Sequence: Synthetic peptide
SNNQRPS

SEQ ID NO: 2556 - protein, 12 aa, synthetic construct
  REGION 1..12: note = Description of Artificial Sequence: Synthetic peptide
AAWDDSLNGPGV

SEQ ID NO: 2557 - protein, 7 aa, synthetic construct
  REGION 1..7: note = Description of Artificial Sequence: Synthetic peptide
GDSINNH

SEQ ID NO: 2558 - protein, 5 aa, synthetic construct
  REGION 1..5: note = Description of Artificial Sequence: Synthetic peptide
FYNGN

SEQ ID NO: 2559 - protein, 11 aa, synthetic construct
  REGION 1..11: note = Description of Artificial Sequence: Synthetic peptide
VGRWVLRTAFD

SEQ ID NO: 2560 - protein, 9 aa, synthetic construct
  REGION 1..9: note = Description of Artificial Sequence: Synthetic peptide
SSSNIGSNT

SEQ ID NO: 2561 - skipped

SEQ ID NO: 2562 - protein, 9 aa, synthetic construct
  REGION 1..9: note = Description of Artificial Sequence: Synthetic peptide
WDDSLNGPG

SEQ ID NO: 2563 - protein, 10 aa, synthetic construct
  REGION 1..10: note = Description of Artificial Sequence: Synthetic peptide
GDSINNHFWS

SEQ ID NO: 2564 - protein, 9 aa, synthetic construct
  REGION 1..9: note = Description of Artificial Sequence: Synthetic peptide
FVFYNGNTN

SEQ ID NO: 2565 - protein, 12 aa, synthetic construct
  REGION 1..12: note = Description of Artificial Sequence: Synthetic peptide
VGRWVLRTAFDI

SEQ ID NO: 2566 - protein, 13 aa, synthetic construct
  REGION 1..13: note = Description of Artificial Sequence: Synthetic peptide
SGSSSNIGSNTVN

SEQ ID NO: 2567 - protein, 7 aa, synthetic construct
  REGION 1..7: note = Description of Artificial Sequence: Synthetic peptide
SNNQRPS

SEQ ID NO: 2568 - protein, 12 aa, synthetic construct
  REGION 1..12: note = Description of Artificial Sequence: Synthetic peptide
AAWDDSLNGPGV

SEQ ID NO: 2569 - protein, 6 aa, synthetic construct
  REGION 1..6: note = Description of Artificial Sequence: Synthetic peptide
NNHFWS

SEQ ID NO: 2570 - protein, 12 aa, synthetic construct
  REGION 1..12: note = Description of Artificial Sequence: Synthetic peptide
WIGFVFYNGNTN

SEQ ID NO: 2571 - protein, 13 aa, synthetic construct
  REGION 1..13: note = Description of Artificial Sequence: Synthetic peptide
ARVGRWVLRTAFD

SEQ ID NO: 2572 - protein, 9 aa, synthetic construct
  REGION 1..9: note = Description of Artificial Sequence: Synthetic peptide
IGSNTVNWY

SEQ ID NO: 2573 - protein, 10 aa, synthetic construct
  REGION 1..10: note = Description of Artificial Sequence: Synthetic peptide
LLIYSNNQRP

SEQ ID NO: 2574 - protein, 11 aa, synthetic construct
  REGION 1..11: note = Description of Artificial Sequence: Synthetic peptide
AAWDDSLNGPG

SEQ ID NO: 2575 - protein, 8 aa, synthetic construct
  REGION 1..8: note = Description of Artificial Sequence: Synthetic peptide
GDSINNHF

SEQ ID NO: 2576 - protein, 7 aa, synthetic construct
  REGION 1..7: note = Description of Artificial Sequence: Synthetic peptide
VFYNGNT

SEQ ID NO: 2577 - protein, 14 aa, synthetic construct
  REGION 1..14: note = Description of Artificial Sequence: Synthetic peptide
ARVGRWVLRTAFDI

SEQ ID NO: 2578 - protein, 8 aa, synthetic construct
  REGION 1..8: note = Description of Artificial Sequence: Synthetic peptide
SSNIGSNT

SEQ ID NO: 2579 - skipped

SEQ ID NO: 2580 - protein, 12 aa, synthetic construct
  REGION 1..12: note = Description of Artificial Sequence: Synthetic peptide
AAWDDSLNGPGV

SEQ ID NO: 2581 - protein, 120 aa, synthetic construct
  REGION 1..120: note = Description of Artificial Sequence: Synthetic polypeptide
QVQLVESGPGLVKPSETLSLTCTVSGDSINNHFWSWIRQPPGKGLEWIGFVFYNGNTNYNPSLKSRVTISIDTSKSQFSLKLTSVTAADTAVYYCARVGRWVLRTAFDIWGQGTMVTVSS

SEQ ID NO: 2582 - protein, 111 aa, synthetic construct
  REGION 1..111: note = Description of Artificial Sequence: Synthetic polypeptide
QSALTQPPSASGTPGQRVTISCSGSSSNIGSNTVNWYQQLPGTAPKLLIYSNNQRPSGVPARFSGSKSGTSASLAISGLQSEDEADYYCAAWDDSLNGPGVFGGGTKLTVL

SEQ ID NO: 2583 - protein, 450 aa, synthetic construct
  REGION 1..450: note = Description of Artificial Sequence: Synthetic polypeptide
QVQLVESGPGLVKPSETLSLTCTVSGDSINNHFWSWIRQPPGKGLEWIGFVFYNGNTNYNPSLKSRVTISIDTSKSQFSLKLTSVTAADTAVYYCARVGRWVLRTAFDIWGQGTMVTVSSASTKGPSVFPLAPSSKSTSGGTAALGCLVKDYFPEPVTVSWNSGALTSGVHTFPAVLQSSGLYSLSSVVTVPSSSLGTQTYICNVNHKPSNTKVDKKVEPKSCDKTHTCPPCPAPELLGGPSVFLFPPKPKDTLMISRTPEVTCVVVDVSHEDPEVKFNWYVDGVEVHNAKTKPREEQYNSTYRVVSVLTVLHQDWLNGKEYKCKVSNKALPAPIEKTISKAKGQPREPQVYTLPPSREEMTKNQVSLTCLVKGFYPSDIAVEWESNGQPENNYKTTPPVLDSDGSFFLYSKLTVDKSRWQQGNVFSCSVMHEALHNHYTQKSLSLSPGK

SEQ ID NO: 2584 - protein, 217 aa, synthetic construct
  REGION 1..217: note = Description of Artificial Sequence: Synthetic polypeptide
QSALTQPPSASGTPGQRVTISCSGSSSNIGSNTVNWYQQLPGTAPKLLIYSNNQRPSGVPARFSGSKSGTSASLAISGLQSEDEADYYCAAWDDSLNGPGVFGGGTKLTVLGQPKAAPSVTLFPPSSEELQANKATLVCLISDFYPGAVTVAWKADSSPVKAGVETTTPSKQSNNKYAASSYLSLTPEQWKSHRSYSCQVTHEGSTVEKTVAPTECS

SEQ ID NO: 2585 - protein, 5 aa, synthetic construct
  REGION 1..5: note = Description of Artificial Sequence: Synthetic peptide
NYFWS

SEQ ID NO: 2586 - protein, 16 aa, synthetic construct
  REGION 1..16: note = Description of Artificial Sequence: Synthetic peptide
YIYYSGSTNYNPSLKS

SEQ ID NO: 2587 - protein, 12 aa, synthetic construct
  REGION 1..12: note = Description of Artificial Sequence: Synthetic peptide
EGKWELRSAFDI

SEQ ID NO: 2588 - protein, 13 aa, synthetic construct
  REGION 1..13: note = Description of Artificial Sequence: Synthetic peptide
SGSSSNIESNTVN

SEQ ID NO: 2589 - protein, 7 aa, synthetic construct
  REGION 1..7: note = Description of Artificial Sequence: Synthetic peptide
SNNQRPS

SEQ ID NO: 2590 - protein, 11 aa, synthetic construct
  REGION 1..11: note = Description of Artificial Sequence: Synthetic peptide
TAWDDSLNGPV

SEQ ID NO: 2591 - protein, 7 aa, synthetic construct
  REGION 1..7: note = Description of Artificial Sequence: Synthetic peptide
GGSINNY

SEQ ID NO: 2592 - protein, 5 aa, synthetic construct
  REGION 1..5: note = Description of Artificial Sequence: Synthetic peptide
YYSGS

SEQ ID NO: 2593 - protein, 11 aa, synthetic construct
  REGION 1..11: note = Description of Artificial Sequence: Synthetic peptide
EGKWELRSAFD

SEQ ID NO: 2594 - protein, 9 aa, synthetic construct
  REGION 1..9: note = Description of Artificial Sequence: Synthetic peptide
SSSNIESNT

SEQ ID NO: 2595 - skipped

SEQ ID NO: 2596 - protein, 8 aa, synthetic construct
  REGION 1..8: note = Description of Artificial Sequence: Synthetic peptide
WDDSLNGP

SEQ ID NO: 2597 - protein, 10 aa, synthetic construct
  REGION 1..10: note = Description of Artificial Sequence: Synthetic peptide
GGSINNYFWS

SEQ ID NO: 2598 - protein, 9 aa, synthetic construct
  REGION 1..9: note = Description of Artificial Sequence: Synthetic peptide
YIYYSGSTN

SEQ ID NO: 2599 - protein, 12 aa, synthetic construct
  REGION 1..12: note = Description of Artificial Sequence: Synthetic peptide
EGKWELRSAFDI

SEQ ID NO: 2600 - protein, 13 aa, synthetic construct
  REGION 1..13: note = Description of Artificial Sequence: Synthetic peptide
SGSSSNIESNTVN

SEQ ID NO: 2601 - protein, 7 aa, synthetic construct
  REGION 1..7: note = Description of Artificial Sequence: Synthetic peptide
SNNQRPS

SEQ ID NO: 2602 - protein, 11 aa, synthetic construct
  REGION 1..11: note = Description of Artificial Sequence: Synthetic peptide
TAWDDSLNGPV

SEQ ID NO: 2603 - protein, 6 aa, synthetic construct
  REGION 1..6: note = Description of Artificial Sequence: Synthetic peptide
NNYFWS

SEQ ID NO: 2604 - protein, 12 aa, synthetic construct
  REGION 1..12: note = Description of Artificial Sequence: Synthetic peptide
WIGYIYYSGSTN

SEQ ID NO: 2605 - protein, 13 aa, synthetic construct
  REGION 1..13: note = Description of Artificial Sequence: Synthetic peptide
AREGKWELRSAFD

SEQ ID NO: 2606 - protein, 9 aa, synthetic construct
  REGION 1..9: note = Description of Artificial Sequence: Synthetic peptide
IESNTVNWY

SEQ ID NO: 2607 - protein, 10 aa, synthetic construct
  REGION 1..10: note = Description of Artificial Sequence: Synthetic peptide
LLIYSNNQRP

SEQ ID NO: 2608 - protein, 10 aa, synthetic construct
  REGION 1..10: note = Description of Artificial Sequence: Synthetic peptide
TAWDDSLNGP

SEQ ID NO: 2609 - protein, 8 aa, synthetic construct
  REGION 1..8: note = Description of Artificial Sequence: Synthetic peptide
GGSINNYF

SEQ ID NO: 2610 - protein, 7 aa, synthetic construct
  REGION 1..7: note = Description of Artificial Sequence: Synthetic peptide
IYYSGST

SEQ ID NO: 2611 - protein, 14 aa, synthetic construct
  REGION 1..14: note = Description of Artificial Sequence: Synthetic peptide
AREGKWELRSAFDI

SEQ ID NO: 2612 - protein, 8 aa, synthetic construct
  REGION 1..8: note = Description of Artificial Sequence: Synthetic peptide
SSNIESNT

SEQ ID NO: 2613 - skipped

SEQ ID NO: 2614 - protein, 11 aa, synthetic construct
  REGION 1..11: note = Description of Artificial Sequence: Synthetic peptide
TAWDDSLNGPV

SEQ ID NO: 2615 - protein, 120 aa, synthetic construct
  REGION 1..120: note = Description of Artificial Sequence: Synthetic polypeptide
QVQLQESGPGLVKPSETLSLTCTVSGGSINNYFWSWIRQPPGKGLEWIGYIYYSGSTNYNPSLKSRVTISVVTSMNQFSLKLSSVTAADTAVYYCAREGKWELRSAFDIWGQGTMVTVSS

SEQ ID NO: 2616 - protein, 110 aa, synthetic construct
  REGION 1..110: note = Description of Artificial Sequence: Synthetic polypeptide
QSVLTQPPSASGTPGQRVTISCSGSSSNIESNTVNWYQQLPRTAPKLLIYSNNQRPSGVPDRFSGSKSGTSASLAISGLQSEDEADYYCTAWDDSLNGPVFGGGTKVTVL

SEQ ID NO: 2617 - protein, 450 aa, synthetic construct
  REGION 1..450: note = Description of Artificial Sequence: Synthetic polypeptide
QVQLQESGPGLVKPSETLSLTCTVSGGSINNYFWSWIRQPPGKGLEWIGYIYYSGSTNYNPSLKSRVTISVVTSMNQFSLKLSSVTAADTAVYYCAREGKWELRSAFDIWGQGTMVTVSSASTKGPSVFPLAPSSKSTSGGTAALGCLVKDYFPEPVTVSWNSGALTSGVHTFPAVLQSSGLYSLSSVVTVPSSSLGTQTYICNVNHKPSNTKVDKKVEPKSCDKTHTCPPCPAPELLGGPSVFLFPPKPKDTLMISRTPEVTCVVVDVSHEDPEVKFNWYVDGVEVHNAKTKPREEQYNSTYRVVSVLTVLHQDWLNGKEYKCKVSNKALPAPIEKTISKAKGQPREPQVYTLPPSREEMTKNQVSLTCLVKGFYPSDIAVEWESNGQPENNYKTTPPVLDSDGSFFLYSKLTVDKSRWQQGNVFSCSVMHEALHNHYTQKSLSLSPGK

SEQ ID NO: 2618 - protein, 216 aa, synthetic construct
  REGION 1..216: note = Description of Artificial Sequence: Synthetic polypeptide
QSVLTQPPSASGTPGQRVTISCSGSSSNIESNTVNWYQQLPRTAPKLLIYSNNQRPSGVPDRFSGSKSGTSASLAISGLQSEDEADYYCTAWDDSLNGPVFGGGTKVTVLGQPKAAPSVTLFPPSSEELQANKATLVCLISDFYPGAVTVAWKADSSPVKAGVETTTPSKQSNNKYAASSYLSLTPEQWKSHRSYSCQVTHEGSTVEKTVAPTECS

SEQ ID NO: 2619 - protein, 5 aa, synthetic construct
  REGION 1..5: note = Description of Artificial Sequence: Synthetic peptide
SEYIH

SEQ ID NO: 2620 - protein, 17 aa, synthetic construct
  REGION 1..17: note = Description of Artificial Sequence: Synthetic peptide
IINPSGGSTSYAQRFQG

SEQ ID NO: 2621 - protein, 11 aa, synthetic construct
  REGION 1..11: note = Description of Artificial Sequence: Synthetic peptide
ERGYSYGSFDY

SEQ ID NO: 2622 - protein, 11 aa, synthetic construct
  REGION 1..11: note = Description of Artificial Sequence: Synthetic peptide
RASQGISSYLA

SEQ ID NO: 2623 - protein, 7 aa, synthetic construct
  REGION 1..7: note = Description of Artificial Sequence: Synthetic peptide
AASTLQS

SEQ ID NO: 2624 - protein, 9 aa, synthetic construct
  REGION 1..9: note = Description of Artificial Sequence: Synthetic peptide
QQFNSYSLT

SEQ ID NO: 2625 - protein, 7 aa, synthetic construct
  REGION 1..7: note = Description of Artificial Sequence: Synthetic peptide
GYTFTSE

SEQ ID NO: 2626 - protein, 6 aa, synthetic construct
  REGION 1..6: note = Description of Artificial Sequence: Synthetic peptide
NPSGGS

SEQ ID NO: 2627 - protein, 10 aa, synthetic construct
  REGION 1..10: note = Description of Artificial Sequence: Synthetic peptide
ERGYSYGSFD

SEQ ID NO: 2628 - protein, 7 aa, synthetic construct
  REGION 1..7: note = Description of Artificial Sequence: Synthetic peptide
SQGISSY

SEQ ID NO: 2629 - skipped

SEQ ID NO: 2630 - protein, 6 aa, synthetic construct
  REGION 1..6: note = Description of Artificial Sequence: Synthetic peptide
FNSYSL

SEQ ID NO: 2631 - protein, 10 aa, synthetic construct
  REGION 1..10: note = Description of Artificial Sequence: Synthetic peptide
GYTFTSEYIH

SEQ ID NO: 2632 - protein, 10 aa, synthetic construct
  REGION 1..10: note = Description of Artificial Sequence: Synthetic peptide
IINPSGGSTS

SEQ ID NO: 2633 - protein, 11 aa, synthetic construct
  REGION 1..11: note = Description of Artificial Sequence: Synthetic peptide
ERGYSYGSFDY

SEQ ID NO: 2634 - protein, 11 aa, synthetic construct
  REGION 1..11: note = Description of Artificial Sequence: Synthetic peptide
RASQGISSYLA

SEQ ID NO: 2635 - protein, 7 aa, synthetic construct
  REGION 1..7: note = Description of Artificial Sequence: Synthetic peptide
AASTLQS

SEQ ID NO: 2636 - protein, 9 aa, synthetic construct
  REGION 1..9: note = Description of Artificial Sequence: Synthetic peptide
QQFNSYSLT

SEQ ID NO: 2637 - protein, 6 aa, synthetic construct
  REGION 1..6: note = Description of Artificial Sequence: Synthetic peptide
TSEYIH

SEQ ID NO: 2638 - protein, 13 aa, synthetic construct
  REGION 1..13: note = Description of Artificial Sequence: Synthetic peptide
WMGIINPSGGSTS

SEQ ID NO: 2639 - protein, 12 aa, synthetic construct
  REGION 1..12: note = Description of Artificial Sequence: Synthetic peptide
ARERGYSYGSFD

SEQ ID NO: 2640 - protein, 7 aa, synthetic construct
  REGION 1..7: note = Description of Artificial Sequence: Synthetic peptide
SSYLAWY

SEQ ID NO: 2641 - protein, 10 aa, synthetic construct
  REGION 1..10: note = Description of Artificial Sequence: Synthetic peptide
LLIYAASTLQ

SEQ ID NO: 2642 - protein, 8 aa, synthetic construct
  REGION 1..8: note = Description of Artificial Sequence: Synthetic peptide
QQFNSYSL

SEQ ID NO: 2643 - protein, 8 aa, synthetic construct
  REGION 1..8: note = Description of Artificial Sequence: Synthetic peptide
GYTFTSEY

SEQ ID NO: 2644 - protein, 8 aa, synthetic construct
  REGION 1..8: note = Description of Artificial Sequence: Synthetic peptide
INPSGGST

SEQ ID NO: 2645 - protein, 13 aa, synthetic construct
  REGION 1..13: note = Description of Artificial Sequence: Synthetic peptide
ARERGYSYGSFDY

SEQ ID NO: 2646 - protein, 6 aa, synthetic construct
  REGION 1..6: note = Description of Artificial Sequence: Synthetic peptide
QGISSY

SEQ ID NO: 2647 - skipped

SEQ ID NO: 2648 - protein, 9 aa, synthetic construct
  REGION 1..9: note = Description of Artificial Sequence: Synthetic peptide
QQFNSYSLT

SEQ ID NO: 2649 - protein, 120 aa, synthetic construct
  REGION 1..120: note = Description of Artificial Sequence: Synthetic polypeptide
QVQLVESGAEVKKPGASVKVSCKASGYTFTSEYIHWVRQAPGQGLEWMGIINPSGGSTSYAQRFQGRVTMTRDTSTSTVYMEVNSLRSEDTAVYYCARERGYSYGSFDYWGQGTLVTVSS

SEQ ID NO: 2650 - protein, 107 aa, synthetic construct
  REGION 1..107: note = Description of Artificial Sequence: Synthetic polypeptide
EIVLTQSPSFLSASAGDRVTITCRASQGISSYLAWYQQKPEKAPKLLIYAASTLQSGVPSRFSGSGSGTEFTLTISSLQPEDFATYYCQQFNSYSLTFGGGTKLEIK

SEQ ID NO: 2651 - protein, 450 aa, synthetic construct
  REGION 1..450: note = Description of Artificial Sequence: Synthetic polypeptide
QVQLVESGAEVKKPGASVKVSCKASGYTFTSEYIHWVRQAPGQGLEWMGIINPSGGSTSYAQRFQGRVTMTRDTSTSTVYMEVNSLRSEDTAVYYCARERGYSYGSFDYWGQGTLVTVSSASTKGPSVFPLAPSSKSTSGGTAALGCLVKDYFPEPVTVSWNSGALTSGVHTFPAVLQSSGLYSLSSVVTVPSSSLGTQTYICNVNHKPSNTKVDKKVEPKSCDKTHTCPPCPAPELLGGPSVFLFPPKPKDTLMISRTPEVTCVVVDVSHEDPEVKFNWYVDGVEVHNAKTKPREEQYNSTYRVVSVLTVLHQDWLNGKEYKCKVSNKALPAPIEKTISKAKGQPREPQVYTLPPSREEMTKNQVSLTCLVKGFYPSDIAVEWESNGQPENNYKTTPPVLDSDGSFFLYSKLTVDKSRWQQGNVFSCSVMHEALHNHYTQKSLSLSPGK

SEQ ID NO: 2652 - protein, 214 aa, synthetic construct
  REGION 1..214: note = Description of Artificial Sequence: Synthetic polypeptide
EIVLTQSPSFLSASAGDRVTITCRASQGISSYLAWYQQKPEKAPKLLIYAASTLQSGVPSRFSGSGSGTEFTLTISSLQPEDFATYYCQQFNSYSLTFGGGTKLEIKRTVAAPSVFIFPPSDEQLKSGTASVVCLLNNFYPREAKVQWKVDNALQSGNSQESVTEQDSKDSTYSLSSTLTLSKADYEKHKVYACEVTHQGLSSPVTKSFNRGEC

SEQ ID NO: 2653 - protein, 5 aa, synthetic construct
  REGION 1..5: note = Description of Artificial Sequence: Synthetic peptide
GYYWS

SEQ ID NO: 2654 - protein, 16 aa, synthetic construct
  REGION 1..16: note = Description of Artificial Sequence: Synthetic peptide
YIFYSGSINYNPSLKN

SEQ ID NO: 2655 - protein, 12 aa, synthetic construct
  REGION 1..12: note = Description of Artificial Sequence: Synthetic peptide
VGKWELRSSFDI

SEQ ID NO: 2656 - protein, 13 aa, synthetic construct
  REGION 1..13: note = Description of Artificial Sequence: Synthetic peptide
SGSTSNIGNNDVS

SEQ ID NO: 2657 - protein, 7 aa, synthetic construct
  REGION 1..7: note = Description of Artificial Sequence: Synthetic peptide
DNNKRPS

SEQ ID NO: 2658 - protein, 11 aa, synthetic construct
  REGION 1..11: note = Description of Artificial Sequence: Synthetic peptide
GTWDSSLSVWV

SEQ ID NO: 2659 - protein, 7 aa, synthetic construct
  REGION 1..7: note = Description of Artificial Sequence: Synthetic peptide
GGSISGY

SEQ ID NO: 2660 - protein, 5 aa, synthetic construct
  REGION 1..5: note = Description of Artificial Sequence: Synthetic peptide
FYSGS

SEQ ID NO: 2661 - protein, 11 aa, synthetic construct
  REGION 1..11: note = Description of Artificial Sequence: Synthetic peptide
VGKWELRSSFD

SEQ ID NO: 2662 - protein, 9 aa, synthetic construct
  REGION 1..9: note = Description of Artificial Sequence: Synthetic peptide
STSNIGNND

SEQ ID NO: 2663 - skipped

SEQ ID NO: 2664 - protein, 8 aa, synthetic construct
  REGION 1..8: note = Description of Artificial Sequence: Synthetic peptide
WDSSLSVW

SEQ ID NO: 2665 - protein, 10 aa, synthetic construct
  REGION 1..10: note = Description of Artificial Sequence: Synthetic peptide
GGSISGYYWS

SEQ ID NO: 2666 - protein, 9 aa, synthetic construct
  REGION 1..9: note = Description of Artificial Sequence: Synthetic peptide
YIFYSGSIN

SEQ ID NO: 2667 - protein, 12 aa, synthetic construct
  REGION 1..12: note = Description of Artificial Sequence: Synthetic peptide
VGKWELRSSFDI

SEQ ID NO: 2668 - protein, 13 aa, synthetic construct
  REGION 1..13: note = Description of Artificial Sequence: Synthetic peptide
SGSTSNIGNNDVS

SEQ ID NO: 2669 - protein, 7 aa, synthetic construct
  REGION 1..7: note = Description of Artificial Sequence: Synthetic peptide
DNNKRPS

SEQ ID NO: 2670 - protein, 11 aa, synthetic construct
  REGION 1..11: note = Description of Artificial Sequence: Synthetic peptide
GTWDSSLSVWV

SEQ ID NO: 2671 - protein, 6 aa, synthetic construct
  REGION 1..6: note = Description of Artificial Sequence: Synthetic peptide
SGYYWS

SEQ ID NO: 2672 - protein, 12 aa, synthetic construct
  REGION 1..12: note = Description of Artificial Sequence: Synthetic peptide
LIGYIFYSGSIN

SEQ ID NO: 2673 - protein, 13 aa, synthetic construct
  REGION 1..13: note = Description of Artificial Sequence: Synthetic peptide
ARVGKWELRSSFD

SEQ ID NO: 2674 - protein, 9 aa, synthetic construct
  REGION 1..9: note = Description of Artificial Sequence: Synthetic peptide
IGNNDVSWY

SEQ ID NO: 2675 - protein, 10 aa, synthetic construct
  REGION 1..10: note = Description of Artificial Sequence: Synthetic peptide
LLIYDNNKRP

SEQ ID NO: 2676 - protein, 10 aa, synthetic construct
  REGION 1..10: note = Description of Artificial Sequence: Synthetic peptide
GTWDSSLSVW

SEQ ID NO: 2677 - protein, 8 aa, synthetic construct
  REGION 1..8: note = Description of Artificial Sequence: Synthetic peptide
GGSISGYY

SEQ ID NO: 2678 - protein, 7 aa, synthetic construct
  REGION 1..7: note = Description of Artificial Sequence: Synthetic peptide
IFYSGSI

SEQ ID NO: 2679 - protein, 14 aa, synthetic construct
  REGION 1..14: note = Description of Artificial Sequence: Synthetic peptide
ARVGKWELRSSFDI

SEQ ID NO: 2680 - protein, 8 aa, synthetic construct
  REGION 1..8: note = Description of Artificial Sequence: Synthetic peptide
TSNIGNND

SEQ ID NO: 2681 - skipped

SEQ ID NO: 2682 - protein, 11 aa, synthetic construct
  REGION 1..11: note = Description of Artificial Sequence: Synthetic peptide
GTWDSSLSVWV

SEQ ID NO: 2683 - protein, 120 aa, synthetic construct
  REGION 1..120: note = Description of Artificial Sequence: Synthetic polypeptide
QVQLQESGPGLVKPSETLSLTCTVSGGSISGYYWSWIRQPPGKGLELIGYIFYSGSINYNPSLKNRVTISLDTSKNQFSLKLTSVTAADTAVYYCARVGKWELRSSFDIWGQGTMVTVSS

SEQ ID NO: 2684 - protein, 110 aa, synthetic construct
  REGION 1..110: note = Description of Artificial Sequence: Synthetic polypeptide
QSVLTQPPSVSAAPGQKVTISCSGSTSNIGNNDVSWYQQLPGTAPKLLIYDNNKRPSGIPDRFSGSKSGTSATLGITGLQTGDEADYYCGTWDSSLSVWVFGGGTKLTVL

SEQ ID NO: 2685 - protein, 450 aa, synthetic construct
  REGION 1..450: note = Description of Artificial Sequence: Synthetic polypeptide
QVQLQESGPGLVKPSETLSLTCTVSGGSISGYYWSWIRQPPGKGLELIGYIFYSGSINYNPSLKNRVTISLDTSKNQFSLKLTSVTAADTAVYYCARVGKWELRSSFDIWGQGTMVTVSSASTKGPSVFPLAPSSKSTSGGTAALGCLVKDYFPEPVTVSWNSGALTSGVHTFPAVLQSSGLYSLSSVVTVPSSSLGTQTYICNVNHKPSNTKVDKKVEPKSCDKTHTCPPCPAPELLGGPSVFLFPPKPKDTLMISRTPEVTCVVVDVSHEDPEVKFNWYVDGVEVHNAKTKPREEQYNSTYRVVSVLTVLHQDWLNGKEYKCKVSNKALPAPIEKTISKAKGQPREPQVYTLPPSREEMTKNQVSLTCLVKGFYPSDIAVEWESNGQPENNYKTTPPVLDSDGSFFLYSKLTVDKSRWQQGNVFSCSVMHEALHNHYTQKSLSLSPGK

SEQ ID NO: 2686 - protein, 216 aa, synthetic construct
  REGION 1..216: note = Description of Artificial Sequence: Synthetic polypeptide
QSVLTQPPSVSAAPGQKVTISCSGSTSNIGNNDVSWYQQLPGTAPKLLIYDNNKRPSGIPDRFSGSKSGTSATLGITGLQTGDEADYYCGTWDSSLSVWVFGGGTKLTVLGQPKAAPSVTLFPPSSEELQANKATLVCLISDFYPGAVTVAWKADSSPVKAGVETTTPSKQSNNKYAASSYLSLTPEQWKSHRSYSCQVTHEGSTVEKTVAPTECS

SEQ ID NO: 2687 - protein, 7 aa, synthetic construct
  REGION 1..7: note = Description of Artificial Sequence: Synthetic peptide
NGGFYWS

SEQ ID NO: 2688 - protein, 16 aa, synthetic construct
  REGION 1..16: note = Description of Artificial Sequence: Synthetic peptide
YINYSGSTYYNPSLES

SEQ ID NO: 2689 - protein, 10 aa, synthetic construct
  REGION 1..10: note = Description of Artificial Sequence: Synthetic peptide
DRNYEWNFDL

SEQ ID NO: 2690 - protein, 11 aa, synthetic construct
  REGION 1..11: note = Description of Artificial Sequence: Synthetic peptide
RASQSVSSYLA

SEQ ID NO: 2691 - protein, 7 aa, synthetic construct
  REGION 1..7: note = Description of Artificial Sequence: Synthetic peptide
DASNRAT

SEQ ID NO: 2692 - protein, 9 aa, synthetic construct
  REGION 1..9: note = Description of Artificial Sequence: Synthetic peptide
QQRSNWPLT

SEQ ID NO: 2693 - protein, 9 aa, synthetic construct
  REGION 1..9: note = Description of Artificial Sequence: Synthetic peptide
GGSISNGGF

SEQ ID NO: 2694 - protein, 5 aa, synthetic construct
  REGION 1..5: note = Description of Artificial Sequence: Synthetic peptide
NYSGS

SEQ ID NO: 2695 - protein, 9 aa, synthetic construct
  REGION 1..9: note = Description of Artificial Sequence: Synthetic peptide
DRNYEWNFD

SEQ ID NO: 2696 - protein, 7 aa, synthetic construct
  REGION 1..7: note = Description of Artificial Sequence: Synthetic peptide
SQSVSSY

SEQ ID NO: 2697 - skipped

SEQ ID NO: 2698 - protein, 6 aa, synthetic construct
  REGION 1..6: note = Description of Artificial Sequence: Synthetic peptide
RSNWPL

SEQ ID NO: 2699 - protein, 12 aa, synthetic construct
  REGION 1..12: note = Description of Artificial Sequence: Synthetic peptide
GGSISNGGFYWS

SEQ ID NO: 2700 - protein, 9 aa, synthetic construct
  REGION 1..9: note = Description of Artificial Sequence: Synthetic peptide
YINYSGSTY

SEQ ID NO: 2701 - protein, 10 aa, synthetic construct
  REGION 1..10: note = Description of Artificial Sequence: Synthetic peptide
DRNYEWNFDL

SEQ ID NO: 2702 - protein, 11 aa, synthetic construct
  REGION 1..11: note = Description of Artificial Sequence: Synthetic peptide
RASQSVSSYLA

SEQ ID NO: 2703 - protein, 7 aa, synthetic construct
  REGION 1..7: note = Description of Artificial Sequence: Synthetic peptide
DASNRAT

SEQ ID NO: 2704 - protein, 9 aa, synthetic construct
  REGION 1..9: note = Description of Artificial Sequence: Synthetic peptide
QQRSNWPLT

SEQ ID NO: 2705 - protein, 8 aa, synthetic construct
  REGION 1..8: note = Description of Artificial Sequence: Synthetic peptide
SNGGFYWS

SEQ ID NO: 2706 - protein, 12 aa, synthetic construct
  REGION 1..12: note = Description of Artificial Sequence: Synthetic peptide
WLGYINYSGSTY

SEQ ID NO: 2707 - protein, 11 aa, synthetic construct
  REGION 1..11: note = Description of Artificial Sequence: Synthetic peptide
ARDRNYEWNFD

SEQ ID NO: 2708 - protein, 7 aa, synthetic construct
  REGION 1..7: note = Description of Artificial Sequence: Synthetic peptide
SSYLAWY

SEQ ID NO: 2709 - protein, 10 aa, synthetic construct
  REGION 1..10: note = Description of Artificial Sequence: Synthetic peptide
LLVYDASNRA

SEQ ID NO: 2710 - protein, 8 aa, synthetic construct
  REGION 1..8: note = Description of Artificial Sequence: Synthetic peptide
QQRSNWPL

SEQ ID NO: 2711 - protein, 10 aa, synthetic construct
  REGION 1..10: note = Description of Artificial Sequence: Synthetic peptide
GGSISNGGFY

SEQ ID NO: 2712 - protein, 7 aa, synthetic construct
  REGION 1..7: note = Description of Artificial Sequence: Synthetic peptide
INYSGST

SEQ ID NO: 2713 - protein, 12 aa, synthetic construct
  REGION 1..12: note = Description of Artificial Sequence: Synthetic peptide
ARDRNYEWNFDL

SEQ ID NO: 2714 - protein, 6 aa, synthetic construct
  REGION 1..6: note = Description of Artificial Sequence: Synthetic peptide
QSVSSY

SEQ ID NO: 2715 - skipped

SEQ ID NO: 2716 - protein, 9 aa, synthetic construct
  REGION 1..9: note = Description of Artificial Sequence: Synthetic peptide
QQRSNWPLT

SEQ ID NO: 2717 - protein, 120 aa, synthetic construct
  REGION 1..120: note = Description of Artificial Sequence: Synthetic polypeptide
QVQLQESGPGLVKPSQTLSLTCTVSGGSISNGGFYWSWIRQHPGKGLEWLGYINYSGSTYYNPSLESRGTISLDTSKNQFSLKLRSVTAADTAVYYCARDRNYEWNFDLWGRGTLVTVSS

SEQ ID NO: 2718 - protein, 107 aa, synthetic construct
  REGION 1..107: note = Description of Artificial Sequence: Synthetic polypeptide
EIVMTQSPATLSLSPGEGATLSCRASQSVSSYLAWYQQKPGQAPRLLVYDASNRATGIPARFSGSGSGTAFTLTITSLEPEDFVVYYCQQRSNWPLTFGGGTKLEIK

SEQ ID NO: 2719 - protein, 450 aa, synthetic construct
  REGION 1..450: note = Description of Artificial Sequence: Synthetic polypeptide
QVQLQESGPGLVKPSQTLSLTCTVSGGSISNGGFYWSWIRQHPGKGLEWLGYINYSGSTYYNPSLESRGTISLDTSKNQFSLKLRSVTAADTAVYYCARDRNYEWNFDLWGRGTLVTVSSASTKGPSVFPLAPSSKSTSGGTAALGCLVKDYFPEPVTVSWNSGALTSGVHTFPAVLQSSGLYSLSSVVTVPSSSLGTQTYICNVNHKPSNTKVDKKVEPKSCDKTHTCPPCPAPELLGGPSVFLFPPKPKDTLMISRTPEVTCVVVDVSHEDPEVKFNWYVDGVEVHNAKTKPREEQYNSTYRVVSVLTVLHQDWLNGKEYKCKVSNKALPAPIEKTISKAKGQPREPQVYTLPPSREEMTKNQVSLTCLVKGFYPSDIAVEWESNGQPENNYKTTPPVLDSDGSFFLYSKLTVDKSRWQQGNVFSCSVMHEALHNHYTQKSLSLSPGK

SEQ ID NO: 2720 - protein, 214 aa, synthetic construct
  REGION 1..214: note = Description of Artificial Sequence: Synthetic polypeptide
EIVMTQSPATLSLSPGEGATLSCRASQSVSSYLAWYQQKPGQAPRLLVYDASNRATGIPARFSGSGSGTAFTLTITSLEPEDFVVYYCQQRSNWPLTFGGGTKLEIKRTVAAPSVFIFPPSDEQLKSGTASVVCLLNNFYPREAKVQWKVDNALQSGNSQESVTEQDSKDSTYSLSSTLTLSKADYEKHKVYACEVTHQGLSSPVTKSFNRGEC

SEQ ID NO: 2721 - protein, 7 aa, synthetic construct
  REGION 1..7: note = Description of Artificial Sequence: Synthetic peptide
NIRMSVS

SEQ ID NO: 2722 - protein, 16 aa, synthetic construct
  REGION 1..16: note = Description of Artificial Sequence: Synthetic peptide
HIFSNDEKSYNSSLKS

SEQ ID NO: 2723 - protein, 9 aa, synthetic construct
  REGION 1..9: note = Description of Artificial Sequence: Synthetic peptide
MRLPYGMDV

SEQ ID NO: 2724 - protein, 13 aa, synthetic construct
  REGION 1..13: note = Description of Artificial Sequence: Synthetic peptide
SGSTSNIGSNTVN

SEQ ID NO: 2725 - protein, 7 aa, synthetic construct
  REGION 1..7: note = Description of Artificial Sequence: Synthetic peptide
SNNQRPS

SEQ ID NO: 2726 - protein, 11 aa, synthetic construct
  REGION 1..11: note = Description of Artificial Sequence: Synthetic peptide
AAWDDSLNGPV

SEQ ID NO: 2727 - protein, 9 aa, synthetic construct
  REGION 1..9: note = Description of Artificial Sequence: Synthetic peptide
GFSLTNIRM

SEQ ID NO: 2728 - protein, 5 aa, synthetic construct
  REGION 1..5: note = Description of Artificial Sequence: Synthetic peptide
FSNDE

SEQ ID NO: 2729 - protein, 8 aa, synthetic construct
  REGION 1..8: note = Description of Artificial Sequence: Synthetic peptide
MRLPYGMD

SEQ ID NO: 2730 - protein, 9 aa, synthetic construct
  REGION 1..9: note = Description of Artificial Sequence: Synthetic peptide
STSNIGSNT

SEQ ID NO: 2731 - skipped

SEQ ID NO: 2732 - protein, 8 aa, synthetic construct
  REGION 1..8: note = Description of Artificial Sequence: Synthetic peptide
WDDSLNGP

SEQ ID NO: 2733 - protein, 12 aa, synthetic construct
  REGION 1..12: note = Description of Artificial Sequence: Synthetic peptide
GFSLTNIRMSVS

SEQ ID NO: 2734 - protein, 9 aa, synthetic construct
  REGION 1..9: note = Description of Artificial Sequence: Synthetic peptide
HIFSNDEKS

SEQ ID NO: 2735 - protein, 9 aa, synthetic construct
  REGION 1..9: note = Description of Artificial Sequence: Synthetic peptide
MRLPYGMDV

SEQ ID NO: 2736 - protein, 13 aa, synthetic construct
  REGION 1..13: note = Description of Artificial Sequence: Synthetic peptide
SGSTSNIGSNTVN

SEQ ID NO: 2737 - protein, 7 aa, synthetic construct
  REGION 1..7: note = Description of Artificial Sequence: Synthetic peptide
SNNQRPS

SEQ ID NO: 2738 - protein, 11 aa, synthetic construct
  REGION 1..11: note = Description of Artificial Sequence: Synthetic peptide
AAWDDSLNGPV

SEQ ID NO: 2739 - protein, 8 aa, synthetic construct
  REGION 1..8: note = Description of Artificial Sequence: Synthetic peptide
TNIRMSVS

SEQ ID NO: 2740 - protein, 12 aa, synthetic construct
  REGION 1..12: note = Description of Artificial Sequence: Synthetic peptide
WLAHIFSNDEKS

SEQ ID NO: 2741 - protein, 10 aa, synthetic construct
  REGION 1..10: note = Description of Artificial Sequence: Synthetic peptide
ARMRLPYGMD

SEQ ID NO: 2742 - protein, 9 aa, synthetic construct
  REGION 1..9: note = Description of Artificial Sequence: Synthetic peptide
IGSNTVNWY

SEQ ID NO: 2743 - protein, 10 aa, synthetic construct
  REGION 1..10: note = Description of Artificial Sequence: Synthetic peptide
LLIYSNNQRP

SEQ ID NO: 2744 - protein, 10 aa, synthetic construct
  REGION 1..10: note = Description of Artificial Sequence: Synthetic peptide
AAWDDSLNGP

SEQ ID NO: 2745 - protein, 10 aa, synthetic construct
  REGION 1..10: note = Description of Artificial Sequence: Synthetic peptide
GFSLTNIRMS

SEQ ID NO: 2746 - protein, 7 aa, synthetic construct
  REGION 1..7: note = Description of Artificial Sequence: Synthetic peptide
IFSNDEK

SEQ ID NO: 2747 - protein, 11 aa, synthetic construct
  REGION 1..11: note = Description of Artificial Sequence: Synthetic peptide
ARMRLPYGMDV

SEQ ID NO: 2748 - protein, 8 aa, synthetic construct
  REGION 1..8: note = Description of Artificial Sequence: Synthetic peptide
TSNIGSNT

SEQ ID NO: 2749 - skipped

SEQ ID NO: 2750 - protein, 11 aa, synthetic construct
  REGION 1..11: note = Description of Artificial Sequence: Synthetic peptide
AAWDDSLNGPV

SEQ ID NO: 2751 - protein, 119 aa, synthetic construct
  REGION 1..119: note = Description of Artificial Sequence: Synthetic polypeptide
QVTLRESGPVLVKPTETLTLTCTVSGFSLTNIRMSVSWIRQPPGEALEWLAHIFSNDEKSYNSSLKSRLTISRDTSKSQVVLTLTNVDPVDTATYYCARMRLPYGMDVWGQGTMVTVSS

SEQ ID NO: 2752 - protein, 110 aa, synthetic construct
  REGION 1..110: note = Description of Artificial Sequence: Synthetic polypeptide
QSVLTQPPSASGTPGQRVTISCSGSTSNIGSNTVNWYQQLPGTAPKLLIYSNNQRPSGVPDRFSGSKSGTSASLAISGLQSEDEADFYCAAWDDSLNGPVFGGGTKVTVL

SEQ ID NO: 2753 - protein, 449 aa, synthetic construct
  REGION 1..449: note = Description of Artificial Sequence: Synthetic polypeptide
QVTLRESGPVLVKPTETLTLTCTVSGFSLTNIRMSVSWIRQPPGEALEWLAHIFSNDEKSYNSSLKSRLTISRDTSKSQVVLTLTNVDPVDTATYYCARMRLPYGMDVWGQGTMVTVSSASTKGPSVFPLAPSSKSTSGGTAALGCLVKDYFPEPVTVSWNSGALTSGVHTFPAVLQSSGLYSLSSVVTVPSSSLGTQTYICNVNHKPSNTKVDKKVEPKSCDKTHTCPPCPAPELLGGPSVFLFPPKPKDTLMISRTPEVTCVVVDVSHEDPEVKFNWYVDGVEVHNAKTKPREEQYNSTYRVVSVLTVLHQDWLNGKEYKCKVSNKALPAPIEKTISKAKGQPREPQVYTLPPSREEMTKNQVSLTCLVKGFYPSDIAVEWESNGQPENNYKTTPPVLDSDGSFFLYSKLTVDKSRWQQGNVFSCSVMHEALHNHYTQKSLSLSPGK

SEQ ID NO: 2754 - protein, 216 aa, synthetic construct
  REGION 1..216: note = Description of Artificial Sequence: Synthetic polypeptide
QSVLTQPPSASGTPGQRVTISCSGSTSNIGSNTVNWYQQLPGTAPKLLIYSNNQRPSGVPDRFSGSKSGTSASLAISGLQSEDEADFYCAAWDDSLNGPVFGGGTKVTVLGQPKAAPSVTLFPPSSEELQANKATLVCLISDFYPGAVTVAWKADSSPVKAGVETTTPSKQSNNKYAASSYLSLTPEQWKSHRSYSCQVTHEGSTVEKTVAPTECS

SEQ ID NO: 2755 - protein, 5 aa, synthetic construct
  REGION 1..5: note = Description of Artificial Sequence: Synthetic peptide
NYFWS

SEQ ID NO: 2756 - protein, 16 aa, synthetic construct
  REGION 1..16: note = Description of Artificial Sequence: Synthetic peptide
YIFYSGSTNYNPSLKS

SEQ ID NO: 2757 - protein, 12 aa, synthetic construct
  REGION 1..12: note = Description of Artificial Sequence: Synthetic peptide
VGKWELRTAFDI

SEQ ID NO: 2758 - protein, 14 aa, synthetic construct
  REGION 1..14: note = Description of Artificial Sequence: Synthetic peptide
TGTSSDVADYNYVS

SEQ ID NO: 2759 - protein, 7 aa, synthetic construct
  REGION 1..7: note = Description of Artificial Sequence: Synthetic peptide
EVSNRPS

SEQ ID NO: 2760 - protein, 10 aa, synthetic construct
  REGION 1..10: note = Description of Artificial Sequence: Synthetic peptide
CSYTSSFTVV

SEQ ID NO: 2761 - protein, 7 aa, synthetic construct
  REGION 1..7: note = Description of Artificial Sequence: Synthetic peptide
GGSINNY

SEQ ID NO: 2762 - protein, 5 aa, synthetic construct
  REGION 1..5: note = Description of Artificial Sequence: Synthetic peptide
FYSGS

SEQ ID NO: 2763 - protein, 11 aa, synthetic construct
  REGION 1..11: note = Description of Artificial Sequence: Synthetic peptide
VGKWELRTAFD

SEQ ID NO: 2764 - protein, 10 aa, synthetic construct
  REGION 1..10: note = Description of Artificial Sequence: Synthetic peptide
TSSDVADYNY

SEQ ID NO: 2765 - skipped

SEQ ID NO: 2766 - protein, 7 aa, synthetic construct
  REGION 1..7: note = Description of Artificial Sequence: Synthetic peptide
YTSSFTV

SEQ ID NO: 2767 - protein, 10 aa, synthetic construct
  REGION 1..10: note = Description of Artificial Sequence: Synthetic peptide
GGSINNYFWS

SEQ ID NO: 2768 - protein, 9 aa, synthetic construct
  REGION 1..9: note = Description of Artificial Sequence: Synthetic peptide
YIFYSGSTN

SEQ ID NO: 2769 - protein, 12 aa, synthetic construct
  REGION 1..12: note = Description of Artificial Sequence: Synthetic peptide
VGKWELRTAFDI

SEQ ID NO: 2770 - protein, 14 aa, synthetic construct
  REGION 1..14: note = Description of Artificial Sequence: Synthetic peptide
TGTSSDVADYNYVS

SEQ ID NO: 2771 - protein, 7 aa, synthetic construct
  REGION 1..7: note = Description of Artificial Sequence: Synthetic peptide
EVSNRPS

SEQ ID NO: 2772 - protein, 10 aa, synthetic construct
  REGION 1..10: note = Description of Artificial Sequence: Synthetic peptide
CSYTSSFTVV

SEQ ID NO: 2773 - protein, 6 aa, synthetic construct
  REGION 1..6: note = Description of Artificial Sequence: Synthetic peptide
NNYFWS

SEQ ID NO: 2774 - protein, 12 aa, synthetic construct
  REGION 1..12: note = Description of Artificial Sequence: Synthetic peptide
WIGYIFYSGSTN

SEQ ID NO: 2775 - protein, 13 aa, synthetic construct
  REGION 1..13: note = Description of Artificial Sequence: Synthetic peptide
ARVGKWELRTAFD

SEQ ID NO: 2776 - protein, 10 aa, synthetic construct
  REGION 1..10: note = Description of Artificial Sequence: Synthetic peptide
VADYNYVSWY

SEQ ID NO: 2777 - protein, 10 aa, synthetic construct
  REGION 1..10: note = Description of Artificial Sequence: Synthetic peptide
LMIYEVSNRP

SEQ ID NO: 2778 - protein, 9 aa, synthetic construct
  REGION 1..9: note = Description of Artificial Sequence: Synthetic peptide
CSYTSSFTV

SEQ ID NO: 2779 - protein, 8 aa, synthetic construct
  REGION 1..8: note = Description of Artificial Sequence: Synthetic peptide
GGSINNYF

SEQ ID NO: 2780 - protein, 7 aa, synthetic construct
  REGION 1..7: note = Description of Artificial Sequence: Synthetic peptide
IFYSGST

SEQ ID NO: 2781 - protein, 14 aa, synthetic construct
  REGION 1..14: note = Description of Artificial Sequence: Synthetic peptide
ARVGKWELRTAFDI

SEQ ID NO: 2782 - protein, 9 aa, synthetic construct
  REGION 1..9: note = Description of Artificial Sequence: Synthetic peptide
SSDVADYNY

SEQ ID NO: 2783 - skipped

SEQ ID NO: 2784 - protein, 10 aa, synthetic construct
  REGION 1..10: note = Description of Artificial Sequence: Synthetic peptide
CSYTSSFTVV

SEQ ID NO: 2785 - protein, 120 aa, synthetic construct
  REGION 1..120: note = Description of Artificial Sequence: Synthetic polypeptide
QVQLQESGPGLVKPSETLSLTCTVSGGSINNYFWSWIRQPPGKGLEWIGYIFYSGSTNYNPSLKSRVTISIDTSKNQFSLKVNSVTAADTAVYYCARVGKWELRTAFDIWGQGTMVTVSS

SEQ ID NO: 2786 - protein, 110 aa, synthetic construct
  REGION 1..110: note = Description of Artificial Sequence: Synthetic polypeptide
QSALTQPASVSGSPGQSITISCTGTSSDVADYNYVSWYQQHPGKAPKLMIYEVSNRPSGVSNRFSGSKSGNTASLTISGLQAEDEADYYCCSYTSSFTVVFGGGTKVTVL

SEQ ID NO: 2787 - protein, 450 aa, synthetic construct
  REGION 1..450: note = Description of Artificial Sequence: Synthetic polypeptide
QVQLQESGPGLVKPSETLSLTCTVSGGSINNYFWSWIRQPPGKGLEWIGYIFYSGSTNYNPSLKSRVTISIDTSKNQFSLKVNSVTAADTAVYYCARVGKWELRTAFDIWGQGTMVTVSSASTKGPSVFPLAPSSKSTSGGTAALGCLVKDYFPEPVTVSWNSGALTSGVHTFPAVLQSSGLYSLSSVVTVPSSSLGTQTYICNVNHKPSNTKVDKKVEPKSCDKTHTCPPCPAPELLGGPSVFLFPPKPKDTLMISRTPEVTCVVVDVSHEDPEVKFNWYVDGVEVHNAKTKPREEQYNSTYRVVSVLTVLHQDWLNGKEYKCKVSNKALPAPIEKTISKAKGQPREPQVYTLPPSREEMTKNQVSLTCLVKGFYPSDIAVEWESNGQPENNYKTTPPVLDSDGSFFLYSKLTVDKSRWQQGNVFSCSVMHEALHNHYTQKSLSLSPGK

SEQ ID NO: 2788 - protein, 216 aa, synthetic construct
  REGION 1..216: note = Description of Artificial Sequence: Synthetic polypeptide
QSALTQPASVSGSPGQSITISCTGTSSDVADYNYVSWYQQHPGKAPKLMIYEVSNRPSGVSNRFSGSKSGNTASLTISGLQAEDEADYYCCSYTSSFTVVFGGGTKVTVLGQPKAAPSVTLFPPSSEELQANKATLVCLISDFYPGAVTVAWKADSSPVKAGVETTTPSKQSNNKYAASSYLSLTPEQWKSHRSYSCQVTHEGSTVEKTVAPTECS

SEQ ID NO: 2789 - protein, 5 aa, synthetic construct
  REGION 1..5: note = Description of Artificial Sequence: Synthetic peptide
RYDMH

SEQ ID NO: 2790 - protein, 16 aa, synthetic construct
  REGION 1..16: note = Description of Artificial Sequence: Synthetic peptide
AIGSAGDTYYPGSVKG

SEQ ID NO: 2791 - protein, 11 aa, synthetic construct
  REGION 1..11: note = Description of Artificial Sequence: Synthetic peptide
GKWELRDAFDI

SEQ ID NO: 2792 - protein, 11 aa, synthetic construct
  REGION 1..11: note = Description of Artificial Sequence: Synthetic peptide
RASQGIHSYLA

SEQ ID NO: 2793 - protein, 7 aa, synthetic construct
  REGION 1..7: note = Description of Artificial Sequence: Synthetic peptide
VASTLQS

SEQ ID NO: 2794 - protein, 9 aa, synthetic construct
  REGION 1..9: note = Description of Artificial Sequence: Synthetic peptide
QQLNSYPYT

SEQ ID NO: 2795 - protein, 7 aa, synthetic construct
  REGION 1..7: note = Description of Artificial Sequence: Synthetic peptide
GFTFSRY

SEQ ID NO: 2796 - protein, 5 aa, synthetic construct
  REGION 1..5: note = Description of Artificial Sequence: Synthetic peptide
GSAGD

SEQ ID NO: 2797 - protein, 10 aa, synthetic construct
  REGION 1..10: note = Description of Artificial Sequence: Synthetic peptide
GKWELRDAFD

SEQ ID NO: 2798 - protein, 7 aa, synthetic construct
  REGION 1..7: note = Description of Artificial Sequence: Synthetic peptide
SQGIHSY

SEQ ID NO: 2799 - skipped

SEQ ID NO: 2800 - protein, 6 aa, synthetic construct
  REGION 1..6: note = Description of Artificial Sequence: Synthetic peptide
LNSYPY

SEQ ID NO: 2801 - protein, 10 aa, synthetic construct
  REGION 1..10: note = Description of Artificial Sequence: Synthetic peptide
GFTFSRYDMH

SEQ ID NO: 2802 - protein, 9 aa, synthetic construct
  REGION 1..9: note = Description of Artificial Sequence: Synthetic peptide
AIGSAGDTY

SEQ ID NO: 2803 - protein, 11 aa, synthetic construct
  REGION 1..11: note = Description of Artificial Sequence: Synthetic peptide
GKWELRDAFDI

SEQ ID NO: 2804 - protein, 11 aa, synthetic construct
  REGION 1..11: note = Description of Artificial Sequence: Synthetic peptide
RASQGIHSYLA

SEQ ID NO: 2805 - protein, 7 aa, synthetic construct
  REGION 1..7: note = Description of Artificial Sequence: Synthetic peptide
VASTLQS

SEQ ID NO: 2806 - protein, 9 aa, synthetic construct
  REGION 1..9: note = Description of Artificial Sequence: Synthetic peptide
QQLNSYPYT

SEQ ID NO: 2807 - protein, 6 aa, synthetic construct
  REGION 1..6: note = Description of Artificial Sequence: Synthetic peptide
SRYDMH

SEQ ID NO: 2808 - protein, 12 aa, synthetic construct
  REGION 1..12: note = Description of Artificial Sequence: Synthetic peptide
WVSAIGSAGDTY

SEQ ID NO: 2809 - protein, 12 aa, synthetic construct
  REGION 1..12: note = Description of Artificial Sequence: Synthetic peptide
ARGKWELRDAFD

SEQ ID NO: 2810 - protein, 7 aa, synthetic construct
  REGION 1..7: note = Description of Artificial Sequence: Synthetic peptide
HSYLAWY

SEQ ID NO: 2811 - protein, 10 aa, synthetic construct
  REGION 1..10: note = Description of Artificial Sequence: Synthetic peptide
LLIYVASTLQ

SEQ ID NO: 2812 - protein, 8 aa, synthetic construct
  REGION 1..8: note = Description of Artificial Sequence: Synthetic peptide
QQLNSYPY

SEQ ID NO: 2813 - protein, 8 aa, synthetic construct
  REGION 1..8: note = Description of Artificial Sequence: Synthetic peptide
GFTFSRYD

SEQ ID NO: 2814 - protein, 7 aa, synthetic construct
  REGION 1..7: note = Description of Artificial Sequence: Synthetic peptide
IGSAGDT

SEQ ID NO: 2815 - protein, 13 aa, synthetic construct
  REGION 1..13: note = Description of Artificial Sequence: Synthetic peptide
ARGKWELRDAFDI

SEQ ID NO: 2816 - protein, 6 aa, synthetic construct
  REGION 1..6: note = Description of Artificial Sequence: Synthetic peptide
QGIHSY

SEQ ID NO: 2817 - skipped

SEQ ID NO: 2818 - protein, 9 aa, synthetic construct
  REGION 1..9: note = Description of Artificial Sequence: Synthetic peptide
QQLNSYPYT

SEQ ID NO: 2819 - protein, 119 aa, synthetic construct
  REGION 1..119: note = Description of Artificial Sequence: Synthetic polypeptide
EVQLVESGGDLVQPGGSLRLSCAASGFTFSRYDMHWVRQATGKGLEWVSAIGSAGDTYYPGSVKGRFTISRENAKNSLYLQMNSLRAGDTAVYYCARGKWELRDAFDIWGQGTMVTVSS

SEQ ID NO: 2820 - protein, 107 aa, synthetic construct
  REGION 1..107: note = Description of Artificial Sequence: Synthetic polypeptide
DIVMTQSPSFLSASVGDRVTITCRASQGIHSYLAWYQQKPGKAPKLLIYVASTLQSGVPSRFSGSRSGTEFTLTISSLQPEDFATYYCQQLNSYPYTFGQGTKLEIK

SEQ ID NO: 2821 - protein, 449 aa, synthetic construct
  REGION 1..449: note = Description of Artificial Sequence: Synthetic polypeptide
EVQLVESGGDLVQPGGSLRLSCAASGFTFSRYDMHWVRQATGKGLEWVSAIGSAGDTYYPGSVKGRFTISRENAKNSLYLQMNSLRAGDTAVYYCARGKWELRDAFDIWGQGTMVTVSSASTKGPSVFPLAPSSKSTSGGTAALGCLVKDYFPEPVTVSWNSGALTSGVHTFPAVLQSSGLYSLSSVVTVPSSSLGTQTYICNVNHKPSNTKVDKKVEPKSCDKTHTCPPCPAPELLGGPSVFLFPPKPKDTLMISRTPEVTCVVVDVSHEDPEVKFNWYVDGVEVHNAKTKPREEQYNSTYRVVSVLTVLHQDWLNGKEYKCKVSNKALPAPIEKTISKAKGQPREPQVYTLPPSREEMTKNQVSLTCLVKGFYPSDIAVEWESNGQPENNYKTTPPVLDSDGSFFLYSKLTVDKSRWQQGNVFSCSVMHEALHNHYTQKSLSLSPGK

SEQ ID NO: 2822 - protein, 214 aa, synthetic construct
  REGION 1..214: note = Description of Artificial Sequence: Synthetic polypeptide
DIVMTQSPSFLSASVGDRVTITCRASQGIHSYLAWYQQKPGKAPKLLIYVASTLQSGVPSRFSGSRSGTEFTLTISSLQPEDFATYYCQQLNSYPYTFGQGTKLEIKRTVAAPSVFIFPPSDEQLKSGTASVVCLLNNFYPREAKVQWKVDNALQSGNSQESVTEQDSKDSTYSLSSTLTLSKADYEKHKVYACEVTHQGLSSPVTKSFNRGEC

SEQ ID NO: 2823 - protein, 5 aa, synthetic construct
  REGION 1..5: note = Description of Artificial Sequence: Synthetic peptide
GYFWN

SEQ ID NO: 2824 - protein, 16 aa, synthetic construct
  REGION 1..16: note = Description of Artificial Sequence: Synthetic peptide
YIFYSGSTNYNPSLKS

SEQ ID NO: 2825 - protein, 12 aa, synthetic construct
  REGION 1..12: note = Description of Artificial Sequence: Synthetic peptide
EGKWELRSTFDI

SEQ ID NO: 2826 - protein, 11 aa, synthetic construct
  REGION 1..11: note = Description of Artificial Sequence: Synthetic peptide
QGDSLRSYYAT

SEQ ID NO: 2827 - protein, 7 aa, synthetic construct
  REGION 1..7: note = Description of Artificial Sequence: Synthetic peptide
GENNRPS

SEQ ID NO: 2828 - protein, 11 aa, synthetic construct
  REGION 1..11: note = Description of Artificial Sequence: Synthetic peptide
NSRDTGDHHLV

SEQ ID NO: 2829 - protein, 7 aa, synthetic construct
  REGION 1..7: note = Description of Artificial Sequence: Synthetic peptide
GGSISGY

SEQ ID NO: 2830 - protein, 5 aa, synthetic construct
  REGION 1..5: note = Description of Artificial Sequence: Synthetic peptide
FYSGS

SEQ ID NO: 2831 - protein, 11 aa, synthetic construct
  REGION 1..11: note = Description of Artificial Sequence: Synthetic peptide
EGKWELRSTFD

SEQ ID NO: 2832 - protein, 7 aa, synthetic construct
  REGION 1..7: note = Description of Artificial Sequence: Synthetic peptide
DSLRSYY

SEQ ID NO: 2833 - skipped

SEQ ID NO: 2834 - protein, 8 aa, synthetic construct
  REGION 1..8: note = Description of Artificial Sequence: Synthetic peptide
RDTGDHHL

SEQ ID NO: 2835 - protein, 10 aa, synthetic construct
  REGION 1..10: note = Description of Artificial Sequence: Synthetic peptide
GGSISGYFWN

SEQ ID NO: 2836 - protein, 9 aa, synthetic construct
  REGION 1..9: note = Description of Artificial Sequence: Synthetic peptide
YIFYSGSTN

SEQ ID NO: 2837 - protein, 12 aa, synthetic construct
  REGION 1..12: note = Description of Artificial Sequence: Synthetic peptide
EGKWELRSTFDI

SEQ ID NO: 2838 - protein, 11 aa, synthetic construct
  REGION 1..11: note = Description of Artificial Sequence: Synthetic peptide
QGDSLRSYYAT

SEQ ID NO: 2839 - protein, 7 aa, synthetic construct
  REGION 1..7: note = Description of Artificial Sequence: Synthetic peptide
GENNRPS

SEQ ID NO: 2840 - protein, 11 aa, synthetic construct
  REGION 1..11: note = Description of Artificial Sequence: Synthetic peptide
NSRDTGDHHLV

SEQ ID NO: 2841 - protein, 6 aa, synthetic construct
  REGION 1..6: note = Description of Artificial Sequence: Synthetic peptide
SGYFWN

SEQ ID NO: 2842 - protein, 12 aa, synthetic construct
  REGION 1..12: note = Description of Artificial Sequence: Synthetic peptide
WIGYIFYSGSTN

SEQ ID NO: 2843 - protein, 13 aa, synthetic construct
  REGION 1..13: note = Description of Artificial Sequence: Synthetic peptide
AREGKWELRSTFD

SEQ ID NO: 2844 - protein, 7 aa, synthetic construct
  REGION 1..7: note = Description of Artificial Sequence: Synthetic peptide
SYYATWY

SEQ ID NO: 2845 - protein, 10 aa, synthetic construct
  REGION 1..10: note = Description of Artificial Sequence: Synthetic peptide
LVIYGENNRP

SEQ ID NO: 2846 - protein, 10 aa, synthetic construct
  REGION 1..10: note = Description of Artificial Sequence: Synthetic peptide
NSRDTGDHHL

SEQ ID NO: 2847 - protein, 8 aa, synthetic construct
  REGION 1..8: note = Description of Artificial Sequence: Synthetic peptide
GGSISGYF

SEQ ID NO: 2848 - protein, 7 aa, synthetic construct
  REGION 1..7: note = Description of Artificial Sequence: Synthetic peptide
IFYSGST

SEQ ID NO: 2849 - protein, 14 aa, synthetic construct
  REGION 1..14: note = Description of Artificial Sequence: Synthetic peptide
AREGKWELRSTFDI

SEQ ID NO: 2850 - protein, 6 aa, synthetic construct
  REGION 1..6: note = Description of Artificial Sequence: Synthetic peptide
SLRSYY

SEQ ID NO: 2851 - skipped

SEQ ID NO: 2852 - protein, 11 aa, synthetic construct
  REGION 1..11: note = Description of Artificial Sequence: Synthetic peptide
NSRDTGDHHLV

SEQ ID NO: 2853 - protein, 120 aa, synthetic construct
  REGION 1..120: note = Description of Artificial Sequence: Synthetic polypeptide
QVQLQESGPGLVNPSETLSLTCTVSGGSISGYFWNWIRQPPGKGLEWIGYIFYSGSTNYNPSLKSRVTISVDTSKNQFSLKLSSVTAADTAIYYCAREGKWELRSTFDIWGQGTMVTVSS

SEQ ID NO: 2854 - protein, 108 aa, synthetic construct
  REGION 1..108: note = Description of Artificial Sequence: Synthetic polypeptide
SSELTQDPAVSVALGQTVRITCQGDSLRSYYATWYQQKPGQAPILVIYGENNRPSGIPDRFSGSRSGNTASLTITGAQAEDEADYYCNSRDTGDHHLVFGGGTKLTVL

SEQ ID NO: 2855 - protein, 450 aa, synthetic construct
  REGION 1..450: note = Description of Artificial Sequence: Synthetic polypeptide
QVQLQESGPGLVNPSETLSLTCTVSGGSISGYFWNWIRQPPGKGLEWIGYIFYSGSTNYNPSLKSRVTISVDTSKNQFSLKLSSVTAADTAIYYCAREGKWELRSTFDIWGQGTMVTVSSASTKGPSVFPLAPSSKSTSGGTAALGCLVKDYFPEPVTVSWNSGALTSGVHTFPAVLQSSGLYSLSSVVTVPSSSLGTQTYICNVNHKPSNTKVDKKVEPKSCDKTHTCPPCPAPELLGGPSVFLFPPKPKDTLMISRTPEVTCVVVDVSHEDPEVKFNWYVDGVEVHNAKTKPREEQYNSTYRVVSVLTVLHQDWLNGKEYKCKVSNKALPAPIEKTISKAKGQPREPQVYTLPPSREEMTKNQVSLTCLVKGFYPSDIAVEWESNGQPENNYKTTPPVLDSDGSFFLYSKLTVDKSRWQQGNVFSCSVMHEALHNHYTQKSLSLSPGK

SEQ ID NO: 2856 - protein, 214 aa, synthetic construct
  REGION 1..214: note = Description of Artificial Sequence: Synthetic polypeptide
SSELTQDPAVSVALGQTVRITCQGDSLRSYYATWYQQKPGQAPILVIYGENNRPSGIPDRFSGSRSGNTASLTITGAQAEDEADYYCNSRDTGDHHLVFGGGTKLTVLGQPKAAPSVTLFPPSSEELQANKATLVCLISDFYPGAVTVAWKADSSPVKAGVETTTPSKQSNNKYAASSYLSLTPEQWKSHRSYSCQVTHEGSTVEKTVAPTECS

SEQ ID NO: 2857 - protein, 5 aa, synthetic construct
  REGION 1..5: note = Description of Artificial Sequence: Synthetic peptide
IYAIN

SEQ ID NO: 2858 - protein, 17 aa, synthetic construct
  REGION 1..17: note = Description of Artificial Sequence: Synthetic peptide
GIIPFFGTANYAQKFQD

SEQ ID NO: 2859 - protein, 12 aa, synthetic construct
  REGION 1..12: note = Description of Artificial Sequence: Synthetic peptide
GGDSGYDWGFDY

SEQ ID NO: 2860 - protein, 16 aa, synthetic construct
  REGION 1..16: note = Description of Artificial Sequence: Synthetic peptide
RSSQSLVHSDGNTYLS

SEQ ID NO: 2861 - protein, 7 aa, synthetic construct
  REGION 1..7: note = Description of Artificial Sequence: Synthetic peptide
QISNRFS

SEQ ID NO: 2862 - protein, 9 aa, synthetic construct
  REGION 1..9: note = Description of Artificial Sequence: Synthetic peptide
MQATQFPLT

SEQ ID NO: 2863 - protein, 7 aa, synthetic construct
  REGION 1..7: note = Description of Artificial Sequence: Synthetic peptide
GGTFNIY

SEQ ID NO: 2864 - protein, 6 aa, synthetic construct
  REGION 1..6: note = Description of Artificial Sequence: Synthetic peptide
IPFFGT

SEQ ID NO: 2865 - protein, 11 aa, synthetic construct
  REGION 1..11: note = Description of Artificial Sequence: Synthetic peptide
GGDSGYDWGFD

SEQ ID NO: 2866 - protein, 12 aa, synthetic construct
  REGION 1..12: note = Description of Artificial Sequence: Synthetic peptide
SQSLVHSDGNTY

SEQ ID NO: 2867 - skipped

SEQ ID NO: 2868 - protein, 6 aa, synthetic construct
  REGION 1..6: note = Description of Artificial Sequence: Synthetic peptide
ATQFPL

SEQ ID NO: 2869 - protein, 10 aa, synthetic construct
  REGION 1..10: note = Description of Artificial Sequence: Synthetic peptide
GGTFNIYAIN

SEQ ID NO: 2870 - protein, 10 aa, synthetic construct
  REGION 1..10: note = Description of Artificial Sequence: Synthetic peptide
GIIPFFGTAN

SEQ ID NO: 2871 - protein, 12 aa, synthetic construct
  REGION 1..12: note = Description of Artificial Sequence: Synthetic peptide
GGDSGYDWGFDY

SEQ ID NO: 2872 - protein, 16 aa, synthetic construct
  REGION 1..16: note = Description of Artificial Sequence: Synthetic peptide
RSSQSLVHSDGNTYLS

SEQ ID NO: 2873 - protein, 7 aa, synthetic construct
  REGION 1..7: note = Description of Artificial Sequence: Synthetic peptide
QISNRFS

SEQ ID NO: 2874 - protein, 9 aa, synthetic construct
  REGION 1..9: note = Description of Artificial Sequence: Synthetic peptide
MQATQFPLT

SEQ ID NO: 2875 - protein, 6 aa, synthetic construct
  REGION 1..6: note = Description of Artificial Sequence: Synthetic peptide
NIYAIN

SEQ ID NO: 2876 - protein, 13 aa, synthetic construct
  REGION 1..13: note = Description of Artificial Sequence: Synthetic peptide
WMGGIIPFFGTAN

SEQ ID NO: 2877 - protein, 13 aa, synthetic construct
  REGION 1..13: note = Description of Artificial Sequence: Synthetic peptide
ARGGDSGYDWGFD

SEQ ID NO: 2878 - protein, 12 aa, synthetic construct
  REGION 1..12: note = Description of Artificial Sequence: Synthetic peptide
VHSDGNTYLSWL

SEQ ID NO: 2879 - protein, 10 aa, synthetic construct
  REGION 1..10: note = Description of Artificial Sequence: Synthetic peptide
LLIYQISNRF

SEQ ID NO: 2880 - protein, 8 aa, synthetic construct
  REGION 1..8: note = Description of Artificial Sequence: Synthetic peptide
MQATQFPL

SEQ ID NO: 2881 - protein, 8 aa, synthetic construct
  REGION 1..8: note = Description of Artificial Sequence: Synthetic peptide
GGTFNIYA

SEQ ID NO: 2882 - protein, 8 aa, synthetic construct
  REGION 1..8: note = Description of Artificial Sequence: Synthetic peptide
IIPFFGTA

SEQ ID NO: 2883 - protein, 14 aa, synthetic construct
  REGION 1..14: note = Description of Artificial Sequence: Synthetic peptide
ARGGDSGYDWGFDY

SEQ ID NO: 2884 - protein, 11 aa, synthetic construct
  REGION 1..11: note = Description of Artificial Sequence: Synthetic peptide
QSLVHSDGNTY

SEQ ID NO: 2885 - skipped

SEQ ID NO: 2886 - protein, 9 aa, synthetic construct
  REGION 1..9: note = Description of Artificial Sequence: Synthetic peptide
MQATQFPLT

SEQ ID NO: 2887 - protein, 121 aa, synthetic construct
  REGION 1..121: note = Description of Artificial Sequence: Synthetic polypeptide
QVQLVQSGAEVKKPGSSVKVSCKASGGTFNIYAINWVRQAPGQGLEWMGGIIPFFGTANYAQKFQDRVTITADKSTNTAYMELSSLRSEDTAVFYCARGGDSGYDWGFDYWGQGTLVTVSS

SEQ ID NO: 2888 - protein, 112 aa, synthetic construct
  REGION 1..112: note = Description of Artificial Sequence: Synthetic polypeptide
DIVMTQTPLSSPVTLGQPASISCRSSQSLVHSDGNTYLSWLQQRPGQPPRLLIYQISNRFSGVPDRFSGSGAGTDFTLNISRVEADDVGVYYCMQATQFPLTFGGGTKVEIK

SEQ ID NO: 2889 - protein, 451 aa, synthetic construct
  REGION 1..451: note = Description of Artificial Sequence: Synthetic polypeptide
QVQLVQSGAEVKKPGSSVKVSCKASGGTFNIYAINWVRQAPGQGLEWMGGIIPFFGTANYAQKFQDRVTITADKSTNTAYMELSSLRSEDTAVFYCARGGDSGYDWGFDYWGQGTLVTVSSASTKGPSVFPLAPSSKSTSGGTAALGCLVKDYFPEPVTVSWNSGALTSGVHTFPAVLQSSGLYSLSSVVTVPSSSLGTQTYICNVNHKPSNTKVDKKVEPKSCDKTHTCPPCPAPELLGGPSVFLFPPKPKDTLMISRTPEVTCVVVDVSHEDPEVKFNWYVDGVEVHNAKTKPREEQYNSTYRVVSVLTVLHQDWLNGKEYKCKVSNKALPAPIEKTISKAKGQPREPQVYTLPPSREEMTKNQVSLTCLVKGFYPSDIAVEWESNGQPENNYKTTPPVLDSDGSFFLYSKLTVDKSRWQQGNVFSCSVMHEALHNHYTQKSLSLSPGK

SEQ ID NO: 2890 - protein, 219 aa, synthetic construct
  REGION 1..219: note = Description of Artificial Sequence: Synthetic polypeptide
DIVMTQTPLSSPVTLGQPASISCRSSQSLVHSDGNTYLSWLQQRPGQPPRLLIYQISNRFSGVPDRFSGSGAGTDFTLNISRVEADDVGVYYCMQATQFPLTFGGGTKVEIKRTVAAPSVFIFPPSDEQLKSGTASVVCLLNNFYPREAKVQWKVDNALQSGNSQESVTEQDSKDSTYSLSSTLTLSKADYEKHKVYACEVTHQGLSSPVTKSFNRGEC

SEQ ID NO: 2891 - protein, 5 aa, synthetic construct
  REGION 1..5: note = Description of Artificial Sequence: Synthetic peptide
TYYWS

SEQ ID NO: 2892 - protein, 16 aa, synthetic construct
  REGION 1..16: note = Description of Artificial Sequence: Synthetic peptide
RIYTSDNTNYNPSLKS

SEQ ID NO: 2893 - protein, 10 aa, synthetic construct
  REGION 1..10: note = Description of Artificial Sequence: Synthetic peptide
YNWNYWYFDL

SEQ ID NO: 2894 - protein, 11 aa, synthetic construct
  REGION 1..11: note = Description of Artificial Sequence: Synthetic peptide
RASQGISSYLA

SEQ ID NO: 2895 - protein, 7 aa, synthetic construct
  REGION 1..7: note = Description of Artificial Sequence: Synthetic peptide
TASTLQS

SEQ ID NO: 2896 - protein, 9 aa, synthetic construct
  REGION 1..9: note = Description of Artificial Sequence: Synthetic peptide
QHLNSYPYT

SEQ ID NO: 2897 - protein, 7 aa, synthetic construct
  REGION 1..7: note = Description of Artificial Sequence: Synthetic peptide
GGSINTY

SEQ ID NO: 2898 - protein, 5 aa, synthetic construct
  REGION 1..5: note = Description of Artificial Sequence: Synthetic peptide
YTSDN

SEQ ID NO: 2899 - protein, 9 aa, synthetic construct
  REGION 1..9: note = Description of Artificial Sequence: Synthetic peptide
YNWNYWYFD

SEQ ID NO: 2900 - protein, 7 aa, synthetic construct
  REGION 1..7: note = Description of Artificial Sequence: Synthetic peptide
SQGISSY

SEQ ID NO: 2901 - skipped

SEQ ID NO: 2902 - protein, 6 aa, synthetic construct
  REGION 1..6: note = Description of Artificial Sequence: Synthetic peptide
LNSYPY

SEQ ID NO: 2903 - protein, 10 aa, synthetic construct
  REGION 1..10: note = Description of Artificial Sequence: Synthetic peptide
GGSINTYYWS

SEQ ID NO: 2904 - protein, 9 aa, synthetic construct
  REGION 1..9: note = Description of Artificial Sequence: Synthetic peptide
RIYTSDNTN

SEQ ID NO: 2905 - protein, 10 aa, synthetic construct
  REGION 1..10: note = Description of Artificial Sequence: Synthetic peptide
YNWNYWYFDL

SEQ ID NO: 2906 - protein, 11 aa, synthetic construct
  REGION 1..11: note = Description of Artificial Sequence: Synthetic peptide
RASQGISSYLA

SEQ ID NO: 2907 - protein, 7 aa, synthetic construct
  REGION 1..7: note = Description of Artificial Sequence: Synthetic peptide
TASTLQS

SEQ ID NO: 2908 - protein, 9 aa, synthetic construct
  REGION 1..9: note = Description of Artificial Sequence: Synthetic peptide
QHLNSYPYT

SEQ ID NO: 2909 - protein, 6 aa, synthetic construct
  REGION 1..6: note = Description of Artificial Sequence: Synthetic peptide
NTYYWS

SEQ ID NO: 2910 - protein, 12 aa, synthetic construct
  REGION 1..12: note = Description of Artificial Sequence: Synthetic peptide
LIGRIYTSDNTN

SEQ ID NO: 2911 - protein, 11 aa, synthetic construct
  REGION 1..11: note = Description of Artificial Sequence: Synthetic peptide
ARYNWNYWYFD

SEQ ID NO: 2912 - protein, 7 aa, synthetic construct
  REGION 1..7: note = Description of Artificial Sequence: Synthetic peptide
SSYLAWY

SEQ ID NO: 2913 - protein, 10 aa, synthetic construct
  REGION 1..10: note = Description of Artificial Sequence: Synthetic peptide
LLIYTASTLQ

SEQ ID NO: 2914 - protein, 8 aa, synthetic construct
  REGION 1..8: note = Description of Artificial Sequence: Synthetic peptide
QHLNSYPY

SEQ ID NO: 2915 - protein, 8 aa, synthetic construct
  REGION 1..8: note = Description of Artificial Sequence: Synthetic peptide
GGSINTYY

SEQ ID NO: 2916 - protein, 7 aa, synthetic construct
  REGION 1..7: note = Description of Artificial Sequence: Synthetic peptide
IYTSDNT

SEQ ID NO: 2917 - protein, 12 aa, synthetic construct
  REGION 1..12: note = Description of Artificial Sequence: Synthetic peptide
ARYNWNYWYFDL

SEQ ID NO: 2918 - protein, 6 aa, synthetic construct
  REGION 1..6: note = Description of Artificial Sequence: Synthetic peptide
QGISSY

SEQ ID NO: 2919 - skipped

SEQ ID NO: 2920 - protein, 9 aa, synthetic construct
  REGION 1..9: note = Description of Artificial Sequence: Synthetic peptide
QHLNSYPYT

SEQ ID NO: 2921 - protein, 118 aa, synthetic construct
  REGION 1..118: note = Description of Artificial Sequence: Synthetic polypeptide
QVQLQESGPGLVKPSETLSLTCSVSGGSINTYYWSWFRQPAGKGLELIGRIYTSDNTNYNPSLKSRVTMSVDTSKNQFSLKLSSVTAADTAVYYCARYNWNYWYFDLWGRGTLVTVSS

SEQ ID NO: 2922 - protein, 107 aa, synthetic construct
  REGION 1..107: note = Description of Artificial Sequence: Synthetic polypeptide
DIQMTQSPSFLSASVRDRVNITCRASQGISSYLAWYQQKPGKAPKLLIYTASTLQSGVPSRFSGSGSGTEFTLTISSLQPEDFATYYCQHLNSYPYTFGQGTKVEIK

SEQ ID NO: 2923 - protein, 448 aa, synthetic construct
  REGION 1..448: note = Description of Artificial Sequence: Synthetic polypeptide
QVQLQESGPGLVKPSETLSLTCSVSGGSINTYYWSWFRQPAGKGLELIGRIYTSDNTNYNPSLKSRVTMSVDTSKNQFSLKLSSVTAADTAVYYCARYNWNYWYFDLWGRGTLVTVSSASTKGPSVFPLAPSSKSTSGGTAALGCLVKDYFPEPVTVSWNSGALTSGVHTFPAVLQSSGLYSLSSVVTVPSSSLGTQTYICNVNHKPSNTKVDKKVEPKSCDKTHTCPPCPAPELLGGPSVFLFPPKPKDTLMISRTPEVTCVVVDVSHEDPEVKFNWYVDGVEVHNAKTKPREEQYNSTYRVVSVLTVLHQDWLNGKEYKCKVSNKALPAPIEKTISKAKGQPREPQVYTLPPSREEMTKNQVSLTCLVKGFYPSDIAVEWESNGQPENNYKTTPPVLDSDGSFFLYSKLTVDKSRWQQGNVFSCSVMHEALHNHYTQKSLSLSPGK

SEQ ID NO: 2924 - protein, 214 aa, synthetic construct
  REGION 1..214: note = Description of Artificial Sequence: Synthetic polypeptide
DIQMTQSPSFLSASVRDRVNITCRASQGISSYLAWYQQKPGKAPKLLIYTASTLQSGVPSRFSGSGSGTEFTLTISSLQPEDFATYYCQHLNSYPYTFGQGTKVEIKRTVAAPSVFIFPPSDEQLKSGTASVVCLLNNFYPREAKVQWKVDNALQSGNSQESVTEQDSKDSTYSLSSTLTLSKADYEKHKVYACEVTHQGLSSPVTKSFNRGEC

SEQ ID NO: 2925 - protein, 5 aa, synthetic construct
  REGION 1..5: note = Description of Artificial Sequence: Synthetic peptide
HYYWN

SEQ ID NO: 2926 - protein, 16 aa, synthetic construct
  REGION 1..16: note = Description of Artificial Sequence: Synthetic peptide
RIYTSGSTNYNPSLKS

SEQ ID NO: 2927 - protein, 11 aa, synthetic construct
  REGION 1..11: note = Description of Artificial Sequence: Synthetic peptide
SGGNFYWYFDL

SEQ ID NO: 2928 - protein, 13 aa, synthetic construct
  REGION 1..13: note = Description of Artificial Sequence: Synthetic peptide
SGSSSNIGNNYVS

SEQ ID NO: 2929 - protein, 7 aa, synthetic construct
  REGION 1..7: note = Description of Artificial Sequence: Synthetic peptide
DNNKRPS

SEQ ID NO: 2930 - protein, 11 aa, synthetic construct
  REGION 1..11: note = Description of Artificial Sequence: Synthetic peptide
GTWDSSLSAGV

SEQ ID NO: 2931 - protein, 7 aa, synthetic construct
  REGION 1..7: note = Description of Artificial Sequence: Synthetic peptide
GDSIGHY

SEQ ID NO: 2932 - protein, 5 aa, synthetic construct
  REGION 1..5: note = Description of Artificial Sequence: Synthetic peptide
YTSGS

SEQ ID NO: 2933 - protein, 10 aa, synthetic construct
  REGION 1..10: note = Description of Artificial Sequence: Synthetic peptide
SGGNFYWYFD

SEQ ID NO: 2934 - protein, 9 aa, synthetic construct
  REGION 1..9: note = Description of Artificial Sequence: Synthetic peptide
SSSNIGNNY

SEQ ID NO: 2935 - skipped

SEQ ID NO: 2936 - protein, 8 aa, synthetic construct
  REGION 1..8: note = Description of Artificial Sequence: Synthetic peptide
WDSSLSAG

SEQ ID NO: 2937 - protein, 10 aa, synthetic construct
  REGION 1..10: note = Description of Artificial Sequence: Synthetic peptide
GDSIGHYYWN

SEQ ID NO: 2938 - protein, 9 aa, synthetic construct
  REGION 1..9: note = Description of Artificial Sequence: Synthetic peptide
RIYTSGSTN

SEQ ID NO: 2939 - protein, 11 aa, synthetic construct
  REGION 1..11: note = Description of Artificial Sequence: Synthetic peptide
SGGNFYWYFDL

SEQ ID NO: 2940 - protein, 13 aa, synthetic construct
  REGION 1..13: note = Description of Artificial Sequence: Synthetic peptide
SGSSSNIGNNYVS

SEQ ID NO: 2941 - protein, 7 aa, synthetic construct
  REGION 1..7: note = Description of Artificial Sequence: Synthetic peptide
DNNKRPS

SEQ ID NO: 2942 - protein, 11 aa, synthetic construct
  REGION 1..11: note = Description of Artificial Sequence: Synthetic peptide
GTWDSSLSAGV

SEQ ID NO: 2943 - protein, 6 aa, synthetic construct
  REGION 1..6: note = Description of Artificial Sequence: Synthetic peptide
GHYYWN

SEQ ID NO: 2944 - protein, 12 aa, synthetic construct
  REGION 1..12: note = Description of Artificial Sequence: Synthetic peptide
WIGRIYTSGSTN

SEQ ID NO: 2945 - protein, 12 aa, synthetic construct
  REGION 1..12: note = Description of Artificial Sequence: Synthetic peptide
ARSGGNFYWYFD

SEQ ID NO: 2946 - protein, 9 aa, synthetic construct
  REGION 1..9: note = Description of Artificial Sequence: Synthetic peptide
IGNNYVSWY

SEQ ID NO: 2947 - protein, 10 aa, synthetic construct
  REGION 1..10: note = Description of Artificial Sequence: Synthetic peptide
LLIYDNNKRP

SEQ ID NO: 2948 - protein, 10 aa, synthetic construct
  REGION 1..10: note = Description of Artificial Sequence: Synthetic peptide
GTWDSSLSAG

SEQ ID NO: 2949 - protein, 8 aa, synthetic construct
  REGION 1..8: note = Description of Artificial Sequence: Synthetic peptide
GDSIGHYY

SEQ ID NO: 2950 - protein, 7 aa, synthetic construct
  REGION 1..7: note = Description of Artificial Sequence: Synthetic peptide
IYTSGST

SEQ ID NO: 2951 - protein, 13 aa, synthetic construct
  REGION 1..13: note = Description of Artificial Sequence: Synthetic peptide
ARSGGNFYWYFDL

SEQ ID NO: 2952 - protein, 8 aa, synthetic construct
  REGION 1..8: note = Description of Artificial Sequence: Synthetic peptide
SSNIGNNY

SEQ ID NO: 2953 - skipped

SEQ ID NO: 2954 - protein, 11 aa, synthetic construct
  REGION 1..11: note = Description of Artificial Sequence: Synthetic peptide
GTWDSSLSAGV

SEQ ID NO: 2955 - protein, 119 aa, synthetic construct
  REGION 1..119: note = Description of Artificial Sequence: Synthetic polypeptide
QVQLVQSGPGLVKPSETLSLTCTVSGDSIGHYYWNWIRQPAGKGLEWIGRIYTSGSTNYNPSLKSRVTMSVDTSKNQFSLKLSSVTAADTAVYYCARSGGNFYWYFDLWGRGTLVTVSS

SEQ ID NO: 2956 - protein, 110 aa, synthetic construct
  REGION 1..110: note = Description of Artificial Sequence: Synthetic polypeptide
QSVLTQPPSVSAAPGQKVTISCSGSSSNIGNNYVSWYQQVPGTAPKLLIYDNNKRPSGIPDRISGSKSGTSATLGITGLQTGDEADYYCGTWDSSLSAGVFGGGTKVTVL

SEQ ID NO: 2957 - protein, 449 aa, synthetic construct
  REGION 1..449: note = Description of Artificial Sequence: Synthetic polypeptide
QVQLVQSGPGLVKPSETLSLTCTVSGDSIGHYYWNWIRQPAGKGLEWIGRIYTSGSTNYNPSLKSRVTMSVDTSKNQFSLKLSSVTAADTAVYYCARSGGNFYWYFDLWGRGTLVTVSSASTKGPSVFPLAPSSKSTSGGTAALGCLVKDYFPEPVTVSWNSGALTSGVHTFPAVLQSSGLYSLSSVVTVPSSSLGTQTYICNVNHKPSNTKVDKKVEPKSCDKTHTCPPCPAPELLGGPSVFLFPPKPKDTLMISRTPEVTCVVVDVSHEDPEVKFNWYVDGVEVHNAKTKPREEQYNSTYRVVSVLTVLHQDWLNGKEYKCKVSNKALPAPIEKTISKAKGQPREPQVYTLPPSREEMTKNQVSLTCLVKGFYPSDIAVEWESNGQPENNYKTTPPVLDSDGSFFLYSKLTVDKSRWQQGNVFSCSVMHEALHNHYTQKSLSLSPGK

SEQ ID NO: 2958 - protein, 216 aa, synthetic construct
  REGION 1..216: note = Description of Artificial Sequence: Synthetic polypeptide
QSVLTQPPSVSAAPGQKVTISCSGSSSNIGNNYVSWYQQVPGTAPKLLIYDNNKRPSGIPDRISGSKSGTSATLGITGLQTGDEADYYCGTWDSSLSAGVFGGGTKVTVLGQPKAAPSVTLFPPSSEELQANKATLVCLISDFYPGAVTVAWKADSSPVKAGVETTTPSKQSNNKYAASSYLSLTPEQWKSHRSYSCQVTHEGSTVEKTVAPTECS

SEQ ID NO: 2959 - protein, 5 aa, synthetic construct
  REGION 1..5: note = Description of Artificial Sequence: Synthetic peptide
NYYWS

SEQ ID NO: 2960 - protein, 16 aa, synthetic construct
  REGION 1..16: note = Description of Artificial Sequence: Synthetic peptide
RIYPSGITSYDPSLKS

SEQ ID NO: 2961 - protein, 10 aa, synthetic construct
  REGION 1..10: note = Description of Artificial Sequence: Synthetic peptide
IMGTKGAFDI

SEQ ID NO: 2962 - protein, 14 aa, synthetic construct
  REGION 1..14: note = Description of Artificial Sequence: Synthetic peptide
TGTSSDVGGYNYVS

SEQ ID NO: 2963 - protein, 7 aa, synthetic construct
  REGION 1..7: note = Description of Artificial Sequence: Synthetic peptide
EVSNRPS

SEQ ID NO: 2964 - protein, 9 aa, synthetic construct
  REGION 1..9: note = Description of Artificial Sequence: Synthetic peptide
SSYTSTSVV

SEQ ID NO: 2965 - protein, 7 aa, synthetic construct
  REGION 1..7: note = Description of Artificial Sequence: Synthetic peptide
GGSISNY

SEQ ID NO: 2966 - protein, 5 aa, synthetic construct
  REGION 1..5: note = Description of Artificial Sequence: Synthetic peptide
YPSGI

SEQ ID NO: 2967 - protein, 9 aa, synthetic construct
  REGION 1..9: note = Description of Artificial Sequence: Synthetic peptide
IMGTKGAFD

SEQ ID NO: 2968 - protein, 10 aa, synthetic construct
  REGION 1..10: note = Description of Artificial Sequence: Synthetic peptide
TSSDVGGYNY

SEQ ID NO: 2969 - skipped

SEQ ID NO: 2970 - protein, 6 aa, synthetic construct
  REGION 1..6: note = Description of Artificial Sequence: Synthetic peptide
YTSTSV

SEQ ID NO: 2971 - protein, 10 aa, synthetic construct
  REGION 1..10: note = Description of Artificial Sequence: Synthetic peptide
GGSISNYYWS

SEQ ID NO: 2972 - protein, 9 aa, synthetic construct
  REGION 1..9: note = Description of Artificial Sequence: Synthetic peptide
RIYPSGITS

SEQ ID NO: 2973 - protein, 10 aa, synthetic construct
  REGION 1..10: note = Description of Artificial Sequence: Synthetic peptide
IMGTKGAFDI

SEQ ID NO: 2974 - protein, 14 aa, synthetic construct
  REGION 1..14: note = Description of Artificial Sequence: Synthetic peptide
TGTSSDVGGYNYVS

SEQ ID NO: 2975 - protein, 7 aa, synthetic construct
  REGION 1..7: note = Description of Artificial Sequence: Synthetic peptide
EVSNRPS

SEQ ID NO: 2976 - protein, 9 aa, synthetic construct
  REGION 1..9: note = Description of Artificial Sequence: Synthetic peptide
SSYTSTSVV

SEQ ID NO: 2977 - protein, 6 aa, synthetic construct
  REGION 1..6: note = Description of Artificial Sequence: Synthetic peptide
SNYYWS

SEQ ID NO: 2978 - protein, 12 aa, synthetic construct
  REGION 1..12: note = Description of Artificial Sequence: Synthetic peptide
WIGRIYPSGITS

SEQ ID NO: 2979 - protein, 11 aa, synthetic construct
  REGION 1..11: note = Description of Artificial Sequence: Synthetic peptide
AGIMGTKGAFD

SEQ ID NO: 2980 - protein, 10 aa, synthetic construct
  REGION 1..10: note = Description of Artificial Sequence: Synthetic peptide
VGGYNYVSWY

SEQ ID NO: 2981 - protein, 10 aa, synthetic construct
  REGION 1..10: note = Description of Artificial Sequence: Synthetic peptide
LLIYEVSNRP

SEQ ID NO: 2982 - protein, 8 aa, synthetic construct
  REGION 1..8: note = Description of Artificial Sequence: Synthetic peptide
SSYTSTSV

SEQ ID NO: 2983 - protein, 8 aa, synthetic construct
  REGION 1..8: note = Description of Artificial Sequence: Synthetic peptide
GGSISNYY

SEQ ID NO: 2984 - protein, 7 aa, synthetic construct
  REGION 1..7: note = Description of Artificial Sequence: Synthetic peptide
IYPSGIT

SEQ ID NO: 2985 - protein, 12 aa, synthetic construct
  REGION 1..12: note = Description of Artificial Sequence: Synthetic peptide
AGIMGTKGAFDI

SEQ ID NO: 2986 - protein, 9 aa, synthetic construct
  REGION 1..9: note = Description of Artificial Sequence: Synthetic peptide
SSDVGGYNY

SEQ ID NO: 2987 - skipped

SEQ ID NO: 2988 - protein, 9 aa, synthetic construct
  REGION 1..9: note = Description of Artificial Sequence: Synthetic peptide
SSYTSTSVV

SEQ ID NO: 2989 - protein, 118 aa, synthetic construct
  REGION 1..118: note = Description of Artificial Sequence: Synthetic polypeptide
QVQLQESGPGLVKPSETLSLTCTVSGGSISNYYWSWIRQPAGKGLEWIGRIYPSGITSYDPSLKSRVTMSLDTSKNQFSLKLTSVTAADTAVYYCAGIMGTKGAFDIWGQGTMVTVSS

SEQ ID NO: 2990 - protein, 109 aa, synthetic construct
  REGION 1..109: note = Description of Artificial Sequence: Synthetic polypeptide
QSALTQPASVSGSPGQSITISCTGTSSDVGGYNYVSWYQQHPGKAPKLLIYEVSNRPSGVSNRFSGSKSGSTASLTISGLQAEDEADYYCSSYTSTSVVFGGGTKLTVL

SEQ ID NO: 2991 - protein, 448 aa, synthetic construct
  REGION 1..448: note = Description of Artificial Sequence: Synthetic polypeptide
QVQLQESGPGLVKPSETLSLTCTVSGGSISNYYWSWIRQPAGKGLEWIGRIYPSGITSYDPSLKSRVTMSLDTSKNQFSLKLTSVTAADTAVYYCAGIMGTKGAFDIWGQGTMVTVSSASTKGPSVFPLAPSSKSTSGGTAALGCLVKDYFPEPVTVSWNSGALTSGVHTFPAVLQSSGLYSLSSVVTVPSSSLGTQTYICNVNHKPSNTKVDKKVEPKSCDKTHTCPPCPAPELLGGPSVFLFPPKPKDTLMISRTPEVTCVVVDVSHEDPEVKFNWYVDGVEVHNAKTKPREEQYNSTYRVVSVLTVLHQDWLNGKEYKCKVSNKALPAPIEKTISKAKGQPREPQVYTLPPSREEMTKNQVSLTCLVKGFYPSDIAVEWESNGQPENNYKTTPPVLDSDGSFFLYSKLTVDKSRWQQGNVFSCSVMHEALHNHYTQKSLSLSPGK

SEQ ID NO: 2992 - protein, 215 aa, synthetic construct
  REGION 1..215: note = Description of Artificial Sequence: Synthetic polypeptide
QSALTQPASVSGSPGQSITISCTGTSSDVGGYNYVSWYQQHPGKAPKLLIYEVSNRPSGVSNRFSGSKSGSTASLTISGLQAEDEADYYCSSYTSTSVVFGGGTKLTVLGQPKAAPSVTLFPPSSEELQANKATLVCLISDFYPGAVTVAWKADSSPVKAGVETTTPSKQSNNKYAASSYLSLTPEQWKSHRSYSCQVTHEGSTVEKTVAPTECS

SEQ ID NO: 2993 - protein, 5 aa, synthetic construct
  REGION 1..5: note = Description of Artificial Sequence: Synthetic peptide
SYAIS

SEQ ID NO: 2994 - protein, 17 aa, synthetic construct
  REGION 1..17: note = Description of Artificial Sequence: Synthetic peptide
GIIPIFGTATYAQKFQD

SEQ ID NO: 2995 - protein, 14 aa, synthetic construct
  REGION 1..14: note = Description of Artificial Sequence: Synthetic peptide
GVGWGTDYYYGLDV

SEQ ID NO: 2996 - protein, 16 aa, synthetic construct
  REGION 1..16: note = Description of Artificial Sequence: Synthetic peptide
RSSQGLVHSDGNTYLS

SEQ ID NO: 2997 - protein, 7 aa, synthetic construct
  REGION 1..7: note = Description of Artificial Sequence: Synthetic peptide
KISNRFS

SEQ ID NO: 2998 - protein, 9 aa, synthetic construct
  REGION 1..9: note = Description of Artificial Sequence: Synthetic peptide
MQATHHPLT

SEQ ID NO: 2999 - protein, 7 aa, synthetic construct
  REGION 1..7: note = Description of Artificial Sequence: Synthetic peptide
GGTFSSY

SEQ ID NO: 3000 - protein, 6 aa, synthetic construct
  REGION 1..6: note = Description of Artificial Sequence: Synthetic peptide
IPIFGT

SEQ ID NO: 3001 - protein, 13 aa, synthetic construct
  REGION 1..13: note = Description of Artificial Sequence: Synthetic peptide
GVGWGTDYYYGLD

SEQ ID NO: 3002 - protein, 12 aa, synthetic construct
  REGION 1..12: note = Description of Artificial Sequence: Synthetic peptide
SQGLVHSDGNTY

SEQ ID NO: 3003 - skipped

SEQ ID NO: 3004 - protein, 6 aa, synthetic construct
  REGION 1..6: note = Description of Artificial Sequence: Synthetic peptide
ATHHPL

SEQ ID NO: 3005 - protein, 10 aa, synthetic construct
  REGION 1..10: note = Description of Artificial Sequence: Synthetic peptide
GGTFSSYAIS

SEQ ID NO: 3006 - protein, 10 aa, synthetic construct
  REGION 1..10: note = Description of Artificial Sequence: Synthetic peptide
GIIPIFGTAT

SEQ ID NO: 3007 - protein, 14 aa, synthetic construct
  REGION 1..14: note = Description of Artificial Sequence: Synthetic peptide
GVGWGTDYYYGLDV

SEQ ID NO: 3008 - protein, 16 aa, synthetic construct
  REGION 1..16: note = Description of Artificial Sequence: Synthetic peptide
RSSQGLVHSDGNTYLS

SEQ ID NO: 3009 - protein, 7 aa, synthetic construct
  REGION 1..7: note = Description of Artificial Sequence: Synthetic peptide
KISNRFS

SEQ ID NO: 3010 - protein, 9 aa, synthetic construct
  REGION 1..9: note = Description of Artificial Sequence: Synthetic peptide
MQATHHPLT

SEQ ID NO: 3011 - protein, 6 aa, synthetic construct
  REGION 1..6: note = Description of Artificial Sequence: Synthetic peptide
SSYAIS

SEQ ID NO: 3012 - protein, 13 aa, synthetic construct
  REGION 1..13: note = Description of Artificial Sequence: Synthetic peptide
WMGGIIPIFGTAT

SEQ ID NO: 3013 - protein, 15 aa, synthetic construct
  REGION 1..15: note = Description of Artificial Sequence: Synthetic peptide
ARGVGWGTDYYYGLD

SEQ ID NO: 3014 - protein, 12 aa, synthetic construct
  REGION 1..12: note = Description of Artificial Sequence: Synthetic peptide
VHSDGNTYLSWL

SEQ ID NO: 3015 - protein, 10 aa, synthetic construct
  REGION 1..10: note = Description of Artificial Sequence: Synthetic peptide
LLIYKISNRF

SEQ ID NO: 3016 - protein, 8 aa, synthetic construct
  REGION 1..8: note = Description of Artificial Sequence: Synthetic peptide
MQATHHPL

SEQ ID NO: 3017 - protein, 8 aa, synthetic construct
  REGION 1..8: note = Description of Artificial Sequence: Synthetic peptide
GGTFSSYA

SEQ ID NO: 3018 - protein, 8 aa, synthetic construct
  REGION 1..8: note = Description of Artificial Sequence: Synthetic peptide
IIPIFGTA

SEQ ID NO: 3019 - protein, 16 aa, synthetic construct
  REGION 1..16: note = Description of Artificial Sequence: Synthetic peptide
ARGVGWGTDYYYGLDV

SEQ ID NO: 3020 - protein, 11 aa, synthetic construct
  REGION 1..11: note = Description of Artificial Sequence: Synthetic peptide
QGLVHSDGNTY

SEQ ID NO: 3021 - skipped

SEQ ID NO: 3022 - protein, 9 aa, synthetic construct
  REGION 1..9: note = Description of Artificial Sequence: Synthetic peptide
MQATHHPLT

SEQ ID NO: 3023 - protein, 123 aa, synthetic construct
  REGION 1..123: note = Description of Artificial Sequence: Synthetic polypeptide
EVQLVQSGAEVKKPGSSVKVSCKTSGGTFSSYAISWVRQAPGQGLEWMGGIIPIFGTATYAQKFQDRVTITADKSTSTAYMELSSLRSEDTAVFYCARGVGWGTDYYYGLDVWGQGTTVTVSS

SEQ ID NO: 3024 - protein, 112 aa, synthetic construct
  REGION 1..112: note = Description of Artificial Sequence: Synthetic polypeptide
ETTLTQSPLSSPVTLGQPASISCRSSQGLVHSDGNTYLSWLQQRPGQSPRLLIYKISNRFSGVPDRFSGSGAGTDFTLKISRVEAEDVGVYYCMQATHHPLTFGGGTKVEIK

SEQ ID NO: 3025 - protein, 453 aa, synthetic construct
  REGION 1..453: note = Description of Artificial Sequence: Synthetic polypeptide
EVQLVQSGAEVKKPGSSVKVSCKTSGGTFSSYAISWVRQAPGQGLEWMGGIIPIFGTATYAQKFQDRVTITADKSTSTAYMELSSLRSEDTAVFYCARGVGWGTDYYYGLDVWGQGTTVTVSSASTKGPSVFPLAPSSKSTSGGTAALGCLVKDYFPEPVTVSWNSGALTSGVHTFPAVLQSSGLYSLSSVVTVPSSSLGTQTYICNVNHKPSNTKVDKKVEPKSCDKTHTCPPCPAPELLGGPSVFLFPPKPKDTLMISRTPEVTCVVVDVSHEDPEVKFNWYVDGVEVHNAKTKPREEQYNSTYRVVSVLTVLHQDWLNGKEYKCKVSNKALPAPIEKTISKAKGQPREPQVYTLPPSREEMTKNQVSLTCLVKGFYPSDIAVEWESNGQPENNYKTTPPVLDSDGSFFLYSKLTVDKSRWQQGNVFSCSVMHEALHNHYTQKSLSLSPGK

SEQ ID NO: 3026 - protein, 219 aa, synthetic construct
  REGION 1..219: note = Description of Artificial Sequence: Synthetic polypeptide
ETTLTQSPLSSPVTLGQPASISCRSSQGLVHSDGNTYLSWLQQRPGQSPRLLIYKISNRFSGVPDRFSGSGAGTDFTLKISRVEAEDVGVYYCMQATHHPLTFGGGTKVEIKRTVAAPSVFIFPPSDEQLKSGTASVVCLLNNFYPREAKVQWKVDNALQSGNSQESVTEQDSKDSTYSLSSTLTLSKADYEKHKVYACEVTHQGLSSPVTKSFNRGEC

SEQ ID NO: 3027 - protein, 5 aa, synthetic construct
  REGION 1..5: note = Description of Artificial Sequence: Synthetic peptide
NYYWS

SEQ ID NO: 3028 - protein, 16 aa, synthetic construct
  REGION 1..16: note = Description of Artificial Sequence: Synthetic peptide
RIYSSGITNYNPSLKS

SEQ ID NO: 3029 - protein, 10 aa, synthetic construct
  REGION 1..10: note = Description of Artificial Sequence: Synthetic peptide
IVGVKGAFAI

SEQ ID NO: 3030 - protein, 14 aa, synthetic construct
  REGION 1..14: note = Description of Artificial Sequence: Synthetic peptide
TGTSSDVGGYNYVS

SEQ ID NO: 3031 - protein, 7 aa, synthetic construct
  REGION 1..7: note = Description of Artificial Sequence: Synthetic peptide
EVSNRPS

SEQ ID NO: 3032 - protein, 9 aa, synthetic construct
  REGION 1..9: note = Description of Artificial Sequence: Synthetic peptide
SSYTSTSVV

SEQ ID NO: 3033 - protein, 7 aa, synthetic construct
  REGION 1..7: note = Description of Artificial Sequence: Synthetic peptide
GGSISNY

SEQ ID NO: 3034 - protein, 5 aa, synthetic construct
  REGION 1..5: note = Description of Artificial Sequence: Synthetic peptide
YSSGI

SEQ ID NO: 3035 - protein, 9 aa, synthetic construct
  REGION 1..9: note = Description of Artificial Sequence: Synthetic peptide
IVGVKGAFA

SEQ ID NO: 3036 - protein, 10 aa, synthetic construct
  REGION 1..10: note = Description of Artificial Sequence: Synthetic peptide
TSSDVGGYNY

SEQ ID NO: 3037 - skipped

SEQ ID NO: 3038 - protein, 6 aa, synthetic construct
  REGION 1..6: note = Description of Artificial Sequence: Synthetic peptide
YTSTSV

SEQ ID NO: 3039 - protein, 10 aa, synthetic construct
  REGION 1..10: note = Description of Artificial Sequence: Synthetic peptide
GGSISNYYWS

SEQ ID NO: 3040 - protein, 9 aa, synthetic construct
  REGION 1..9: note = Description of Artificial Sequence: Synthetic peptide
RIYSSGITN

SEQ ID NO: 3041 - protein, 10 aa, synthetic construct
  REGION 1..10: note = Description of Artificial Sequence: Synthetic peptide
IVGVKGAFAI

SEQ ID NO: 3042 - protein, 14 aa, synthetic construct
  REGION 1..14: note = Description of Artificial Sequence: Synthetic peptide
TGTSSDVGGYNYVS

SEQ ID NO: 3043 - protein, 7 aa, synthetic construct
  REGION 1..7: note = Description of Artificial Sequence: Synthetic peptide
EVSNRPS

SEQ ID NO: 3044 - protein, 9 aa, synthetic construct
  REGION 1..9: note = Description of Artificial Sequence: Synthetic peptide
SSYTSTSVV

SEQ ID NO: 3045 - protein, 6 aa, synthetic construct
  REGION 1..6: note = Description of Artificial Sequence: Synthetic peptide
SNYYWS

SEQ ID NO: 3046 - protein, 12 aa, synthetic construct
  REGION 1..12: note = Description of Artificial Sequence: Synthetic peptide
WIGRIYSSGITN

SEQ ID NO: 3047 - protein, 11 aa, synthetic construct
  REGION 1..11: note = Description of Artificial Sequence: Synthetic peptide
AGIVGVKGAFA

SEQ ID NO: 3048 - protein, 10 aa, synthetic construct
  REGION 1..10: note = Description of Artificial Sequence: Synthetic peptide
VGGYNYVSWY

SEQ ID NO: 3049 - protein, 10 aa, synthetic construct
  REGION 1..10: note = Description of Artificial Sequence: Synthetic peptide
LMIYEVSNRP

SEQ ID NO: 3050 - protein, 8 aa, synthetic construct
  REGION 1..8: note = Description of Artificial Sequence: Synthetic peptide
SSYTSTSV

SEQ ID NO: 3051 - protein, 8 aa, synthetic construct
  REGION 1..8: note = Description of Artificial Sequence: Synthetic peptide
GGSISNYY

SEQ ID NO: 3052 - protein, 7 aa, synthetic construct
  REGION 1..7: note = Description of Artificial Sequence: Synthetic peptide
IYSSGIT

SEQ ID NO: 3053 - protein, 12 aa, synthetic construct
  REGION 1..12: note = Description of Artificial Sequence: Synthetic peptide
AGIVGVKGAFAI

SEQ ID NO: 3054 - protein, 9 aa, synthetic construct
  REGION 1..9: note = Description of Artificial Sequence: Synthetic peptide
SSDVGGYNY

SEQ ID NO: 3055 - skipped

SEQ ID NO: 3056 - protein, 9 aa, synthetic construct
  REGION 1..9: note = Description of Artificial Sequence: Synthetic peptide
SSYTSTSVV

SEQ ID NO: 3057 - protein, 118 aa, synthetic construct
  REGION 1..118: note = Description of Artificial Sequence: Synthetic polypeptide
QVQLQQSGPGLVKPSETLSLTCTVSGGSISNYYWSWIRQPAGKGLGWIGRIYSSGITNYNPSLKSRVTMSVDTSKNQLSLKLSSVTAADTAVYYCAGIVGVKGAFAIWGQGTMVTVSS

SEQ ID NO: 3058 - protein, 109 aa, synthetic construct
  REGION 1..109: note = Description of Artificial Sequence: Synthetic polypeptide
QSVLTQPASVSGSPGQSITISCTGTSSDVGGYNYVSWYQQHPGKAPKLMIYEVSNRPSGVSNRFSGSKSGNTASLTISGLQAEDEADYYCSSYTSTSVVFGGGTKLTVL

SEQ ID NO: 3059 - protein, 448 aa, synthetic construct
  REGION 1..448: note = Description of Artificial Sequence: Synthetic polypeptide
QVQLQQSGPGLVKPSETLSLTCTVSGGSISNYYWSWIRQPAGKGLGWIGRIYSSGITNYNPSLKSRVTMSVDTSKNQLSLKLSSVTAADTAVYYCAGIVGVKGAFAIWGQGTMVTVSSASTKGPSVFPLAPSSKSTSGGTAALGCLVKDYFPEPVTVSWNSGALTSGVHTFPAVLQSSGLYSLSSVVTVPSSSLGTQTYICNVNHKPSNTKVDKKVEPKSCDKTHTCPPCPAPELLGGPSVFLFPPKPKDTLMISRTPEVTCVVVDVSHEDPEVKFNWYVDGVEVHNAKTKPREEQYNSTYRVVSVLTVLHQDWLNGKEYKCKVSNKALPAPIEKTISKAKGQPREPQVYTLPPSREEMTKNQVSLTCLVKGFYPSDIAVEWESNGQPENNYKTTPPVLDSDGSFFLYSKLTVDKSRWQQGNVFSCSVMHEALHNHYTQKSLSLSPGK

SEQ ID NO: 3060 - protein, 215 aa, synthetic construct
  REGION 1..215: note = Description of Artificial Sequence: Synthetic polypeptide
QSVLTQPASVSGSPGQSITISCTGTSSDVGGYNYVSWYQQHPGKAPKLMIYEVSNRPSGVSNRFSGSKSGNTASLTISGLQAEDEADYYCSSYTSTSVVFGGGTKLTVLGQPKAAPSVTLFPPSSEELQANKATLVCLISDFYPGAVTVAWKADSSPVKAGVETTTPSKQSNNKYAASSYLSLTPEQWKSHRSYSCQVTHEGSTVEKTVAPTECS

SEQ ID NO: 3061 - protein, 5 aa, synthetic construct
  REGION 1..5: note = Description of Artificial Sequence: Synthetic peptide
NYYWS

SEQ ID NO: 3062 - protein, 16 aa, synthetic construct
  REGION 1..16: note = Description of Artificial Sequence: Synthetic peptide
RIYSSGITNYNPSLKS

SEQ ID NO: 3063 - protein, 10 aa, synthetic construct
  REGION 1..10: note = Description of Artificial Sequence: Synthetic peptide
IVGVKGAFAI

SEQ ID NO: 3064 - protein, 14 aa, synthetic construct
  REGION 1..14: note = Description of Artificial Sequence: Synthetic peptide
TGTSSDVGGYNYVS

SEQ ID NO: 3065 - protein, 7 aa, synthetic construct
  REGION 1..7: note = Description of Artificial Sequence: Synthetic peptide
EVSNRPS

SEQ ID NO: 3066 - protein, 9 aa, synthetic construct
  REGION 1..9: note = Description of Artificial Sequence: Synthetic peptide
SSYTSTSVV

SEQ ID NO: 3067 - protein, 7 aa, synthetic construct
  REGION 1..7: note = Description of Artificial Sequence: Synthetic peptide
GGSISNY

SEQ ID NO: 3068 - protein, 5 aa, synthetic construct
  REGION 1..5: note = Description of Artificial Sequence: Synthetic peptide
YSSGI

SEQ ID NO: 3069 - protein, 9 aa, synthetic construct
  REGION 1..9: note = Description of Artificial Sequence: Synthetic peptide
IVGVKGAFA

SEQ ID NO: 3070 - protein, 10 aa, synthetic construct
  REGION 1..10: note = Description of Artificial Sequence: Synthetic peptide
TSSDVGGYNY

SEQ ID NO: 3071 - skipped

SEQ ID NO: 3072 - protein, 6 aa, synthetic construct
  REGION 1..6: note = Description of Artificial Sequence: Synthetic peptide
YTSTSV

SEQ ID NO: 3073 - protein, 10 aa, synthetic construct
  REGION 1..10: note = Description of Artificial Sequence: Synthetic peptide
GGSISNYYWS

SEQ ID NO: 3074 - protein, 9 aa, synthetic construct
  REGION 1..9: note = Description of Artificial Sequence: Synthetic peptide
RIYSSGITN

SEQ ID NO: 3075 - protein, 10 aa, synthetic construct
  REGION 1..10: note = Description of Artificial Sequence: Synthetic peptide
IVGVKGAFAI

SEQ ID NO: 3076 - protein, 14 aa, synthetic construct
  REGION 1..14: note = Description of Artificial Sequence: Synthetic peptide
TGTSSDVGGYNYVS

SEQ ID NO: 3077 - protein, 7 aa, synthetic construct
  REGION 1..7: note = Description of Artificial Sequence: Synthetic peptide
EVSNRPS

SEQ ID NO: 3078 - protein, 9 aa, synthetic construct
  REGION 1..9: note = Description of Artificial Sequence: Synthetic peptide
SSYTSTSVV

SEQ ID NO: 3079 - protein, 6 aa, synthetic construct
  REGION 1..6: note = Description of Artificial Sequence: Synthetic peptide
SNYYWS

SEQ ID NO: 3080 - protein, 12 aa, synthetic construct
  REGION 1..12: note = Description of Artificial Sequence: Synthetic peptide
WIGRIYSSGITN

SEQ ID NO: 3081 - protein, 11 aa, synthetic construct
  REGION 1..11: note = Description of Artificial Sequence: Synthetic peptide
AGIVGVKGAFA

SEQ ID NO: 3082 - protein, 10 aa, synthetic construct
  REGION 1..10: note = Description of Artificial Sequence: Synthetic peptide
VGGYNYVSWY

SEQ ID NO: 3083 - protein, 10 aa, synthetic construct
  REGION 1..10: note = Description of Artificial Sequence: Synthetic peptide
LMIYEVSNRP

SEQ ID NO: 3084 - protein, 8 aa, synthetic construct
  REGION 1..8: note = Description of Artificial Sequence: Synthetic peptide
SSYTSTSV

SEQ ID NO: 3085 - protein, 8 aa, synthetic construct
  REGION 1..8: note = Description of Artificial Sequence: Synthetic peptide
GGSISNYY

SEQ ID NO: 3086 - protein, 7 aa, synthetic construct
  REGION 1..7: note = Description of Artificial Sequence: Synthetic peptide
IYSSGIT

SEQ ID NO: 3087 - protein, 12 aa, synthetic construct
  REGION 1..12: note = Description of Artificial Sequence: Synthetic peptide
AGIVGVKGAFAI

SEQ ID NO: 3088 - protein, 9 aa, synthetic construct
  REGION 1..9: note = Description of Artificial Sequence: Synthetic peptide
SSDVGGYNY

SEQ ID NO: 3089 - skipped

SEQ ID NO: 3090 - protein, 9 aa, synthetic construct
  REGION 1..9: note = Description of Artificial Sequence: Synthetic peptide
SSYTSTSVV

SEQ ID NO: 3091 - protein, 118 aa, synthetic construct
  REGION 1..118: note = Description of Artificial Sequence: Synthetic polypeptide
QVTLKESGPGLVKPSETLSLTCTVSGGSISNYYWSWIRQPAGKGLGWIGRIYSSGITNYNPSLKSRVTMSVDTSKNQLSLKLSSVTAADTAVYYCAGIVGVKGAFAIWGQGTMVTVSS

SEQ ID NO: 3092 - protein, 109 aa, synthetic construct
  REGION 1..109: note = Description of Artificial Sequence: Synthetic polypeptide
QPVLTQSSSVSGSPGQSITISCTGTSSDVGGYNYVSWYQQHPGKAPKLMIYEVSNRPSGVSNRFSGSKSGNTASLTISGLQAEDEADYYCSSYTSTSVVFGGGTKVTVL

SEQ ID NO: 3093 - protein, 448 aa, synthetic construct
  REGION 1..448: note = Description of Artificial Sequence: Synthetic polypeptide
QVTLKESGPGLVKPSETLSLTCTVSGGSISNYYWSWIRQPAGKGLGWIGRIYSSGITNYNPSLKSRVTMSVDTSKNQLSLKLSSVTAADTAVYYCAGIVGVKGAFAIWGQGTMVTVSSASTKGPSVFPLAPSSKSTSGGTAALGCLVKDYFPEPVTVSWNSGALTSGVHTFPAVLQSSGLYSLSSVVTVPSSSLGTQTYICNVNHKPSNTKVDKKVEPKSCDKTHTCPPCPAPELLGGPSVFLFPPKPKDTLMISRTPEVTCVVVDVSHEDPEVKFNWYVDGVEVHNAKTKPREEQYNSTYRVVSVLTVLHQDWLNGKEYKCKVSNKALPAPIEKTISKAKGQPREPQVYTLPPSREEMTKNQVSLTCLVKGFYPSDIAVEWESNGQPENNYKTTPPVLDSDGSFFLYSKLTVDKSRWQQGNVFSCSVMHEALHNHYTQKSLSLSPGK

SEQ ID NO: 3094 - protein, 215 aa, synthetic construct
  REGION 1..215: note = Description of Artificial Sequence: Synthetic polypeptide
QPVLTQSSSVSGSPGQSITISCTGTSSDVGGYNYVSWYQQHPGKAPKLMIYEVSNRPSGVSNRFSGSKSGNTASLTISGLQAEDEADYYCSSYTSTSVVFGGGTKVTVLGQPKAAPSVTLFPPSSEELQANKATLVCLISDFYPGAVTVAWKADSSPVKAGVETTTPSKQSNNKYAASSYLSLTPEQWKSHRSYSCQVTHEGSTVEKTVAPTECS

SEQ ID NO: 3095 - protein, 5 aa, synthetic construct
  REGION 1..5: note = Description of Artificial Sequence: Synthetic peptide
GYYLH

SEQ ID NO: 3096 - protein, 17 aa, synthetic construct
  REGION 1..17: note = Description of Artificial Sequence: Synthetic peptide
WINPSSGDTDYAQTFQG

SEQ ID NO: 3097 - protein, 9 aa, synthetic construct
  REGION 1..9: note = Description of Artificial Sequence: Synthetic peptide
ELGIGVFDY

SEQ ID NO: 3098 - protein, 17 aa, synthetic construct
  REGION 1..17: note = Description of Artificial Sequence: Synthetic peptide
KSSQSVLYSSNNKNYLG

SEQ ID NO: 3099 - protein, 7 aa, synthetic construct
  REGION 1..7: note = Description of Artificial Sequence: Synthetic peptide
WASTRES

SEQ ID NO: 3100 - protein, 9 aa, synthetic construct
  REGION 1..9: note = Description of Artificial Sequence: Synthetic peptide
QQYYSIPYT

SEQ ID NO: 3101 - protein, 7 aa, synthetic construct
  REGION 1..7: note = Description of Artificial Sequence: Synthetic peptide
GYTFTGY

SEQ ID NO: 3102 - protein, 6 aa, synthetic construct
  REGION 1..6: note = Description of Artificial Sequence: Synthetic peptide
NPSSGD

SEQ ID NO: 3103 - protein, 8 aa, synthetic construct
  REGION 1..8: note = Description of Artificial Sequence: Synthetic peptide
ELGIGVFD

SEQ ID NO: 3104 - protein, 13 aa, synthetic construct
  REGION 1..13: note = Description of Artificial Sequence: Synthetic peptide
SQSVLYSSNNKNY

SEQ ID NO: 3105 - skipped

SEQ ID NO: 3106 - protein, 6 aa, synthetic construct
  REGION 1..6: note = Description of Artificial Sequence: Synthetic peptide
YYSIPY

SEQ ID NO: 3107 - protein, 10 aa, synthetic construct
  REGION 1..10: note = Description of Artificial Sequence: Synthetic peptide
GYTFTGYYLH

SEQ ID NO: 3108 - protein, 10 aa, synthetic construct
  REGION 1..10: note = Description of Artificial Sequence: Synthetic peptide
WINPSSGDTD

SEQ ID NO: 3109 - protein, 9 aa, synthetic construct
  REGION 1..9: note = Description of Artificial Sequence: Synthetic peptide
ELGIGVFDY

SEQ ID NO: 3110 - protein, 17 aa, synthetic construct
  REGION 1..17: note = Description of Artificial Sequence: Synthetic peptide
KSSQSVLYSSNNKNYLG

SEQ ID NO: 3111 - protein, 7 aa, synthetic construct
  REGION 1..7: note = Description of Artificial Sequence: Synthetic peptide
WASTRES

SEQ ID NO: 3112 - protein, 9 aa, synthetic construct
  REGION 1..9: note = Description of Artificial Sequence: Synthetic peptide
QQYYSIPYT

SEQ ID NO: 3113 - protein, 6 aa, synthetic construct
  REGION 1..6: note = Description of Artificial Sequence: Synthetic peptide
TGYYLH

SEQ ID NO: 3114 - protein, 13 aa, synthetic construct
  REGION 1..13: note = Description of Artificial Sequence: Synthetic peptide
WVGWINPSSGDTD

SEQ ID NO: 3115 - protein, 10 aa, synthetic construct
  REGION 1..10: note = Description of Artificial Sequence: Synthetic peptide
ANELGIGVFD

SEQ ID NO: 3116 - protein, 13 aa, synthetic construct
  REGION 1..13: note = Description of Artificial Sequence: Synthetic peptide
LYSSNNKNYLGWY

SEQ ID NO: 3117 - protein, 10 aa, synthetic construct
  REGION 1..10: note = Description of Artificial Sequence: Synthetic peptide
LLIYWASTRE

SEQ ID NO: 3118 - protein, 8 aa, synthetic construct
  REGION 1..8: note = Description of Artificial Sequence: Synthetic peptide
QQYYSIPY

SEQ ID NO: 3119 - protein, 8 aa, synthetic construct
  REGION 1..8: note = Description of Artificial Sequence: Synthetic peptide
GYTFTGYY

SEQ ID NO: 3120 - protein, 8 aa, synthetic construct
  REGION 1..8: note = Description of Artificial Sequence: Synthetic peptide
INPSSGDT

SEQ ID NO: 3121 - protein, 11 aa, synthetic construct
  REGION 1..11: note = Description of Artificial Sequence: Synthetic peptide
ANELGIGVFDY

SEQ ID NO: 3122 - protein, 12 aa, synthetic construct
  REGION 1..12: note = Description of Artificial Sequence: Synthetic peptide
QSVLYSSNNKNY

SEQ ID NO: 3123 - skipped

SEQ ID NO: 3124 - protein, 9 aa, synthetic construct
  REGION 1..9: note = Description of Artificial Sequence: Synthetic peptide
QQYYSIPYT

SEQ ID NO: 3125 - protein, 118 aa, synthetic construct
  REGION 1..118: note = Description of Artificial Sequence: Synthetic polypeptide
EVQLVQSGAEVKKPGASVKVSCKASGYTFTGYYLHWVRQAPGQGLEWVGWINPSSGDTDYAQTFQGRVTMTRDTSISTAYMELSRLRSDDTAVYYCANELGIGVFDYWGQGTLVTVSS

SEQ ID NO: 3126 - protein, 113 aa, synthetic construct
  REGION 1..113: note = Description of Artificial Sequence: Synthetic polypeptide
DIVMTQSPDSLAVSLGERATINCKSSQSVLYSSNNKNYLGWYQQKPGQPPKLLIYWASTRESGVPDRFSGSGSGTDFTLTISSLQAEDVAVYFCQQYYSIPYTFGQGTKVDIK

SEQ ID NO: 3127 - protein, 448 aa, synthetic construct
  REGION 1..448: note = Description of Artificial Sequence: Synthetic polypeptide
EVQLVQSGAEVKKPGASVKVSCKASGYTFTGYYLHWVRQAPGQGLEWVGWINPSSGDTDYAQTFQGRVTMTRDTSISTAYMELSRLRSDDTAVYYCANELGIGVFDYWGQGTLVTVSSASTKGPSVFPLAPSSKSTSGGTAALGCLVKDYFPEPVTVSWNSGALTSGVHTFPAVLQSSGLYSLSSVVTVPSSSLGTQTYICNVNHKPSNTKVDKKVEPKSCDKTHTCPPCPAPELLGGPSVFLFPPKPKDTLMISRTPEVTCVVVDVSHEDPEVKFNWYVDGVEVHNAKTKPREEQYNSTYRVVSVLTVLHQDWLNGKEYKCKVSNKALPAPIEKTISKAKGQPREPQVYTLPPSREEMTKNQVSLTCLVKGFYPSDIAVEWESNGQPENNYKTTPPVLDSDGSFFLYSKLTVDKSRWQQGNVFSCSVMHEALHNHYTQKSLSLSPGK

SEQ ID NO: 3128 - protein, 220 aa, synthetic construct
  REGION 1..220: note = Description of Artificial Sequence: Synthetic polypeptide
DIVMTQSPDSLAVSLGERATINCKSSQSVLYSSNNKNYLGWYQQKPGQPPKLLIYWASTRESGVPDRFSGSGSGTDFTLTISSLQAEDVAVYFCQQYYSIPYTFGQGTKVDIKRTVAAPSVFIFPPSDEQLKSGTASVVCLLNNFYPREAKVQWKVDNALQSGNSQESVTEQDSKDSTYSLSSTLTLSKADYEKHKVYACEVTHQGLSSPVTKSFNRGEC

SEQ ID NO: 3129 - protein, 7 aa, synthetic construct
  REGION 1..7: note = Description of Artificial Sequence: Synthetic peptide
TYGVGVG

SEQ ID NO: 3130 - protein, 16 aa, synthetic construct
  REGION 1..16: note = Description of Artificial Sequence: Synthetic peptide
LIYWNDDKRYNPSLKS

SEQ ID NO: 3131 - protein, 10 aa, synthetic construct
  REGION 1..10: note = Description of Artificial Sequence: Synthetic peptide
ESDWSYYFDY

SEQ ID NO: 3132 - protein, 11 aa, synthetic construct
  REGION 1..11: note = Description of Artificial Sequence: Synthetic peptide
RASQSVSSYLA

SEQ ID NO: 3133 - protein, 7 aa, synthetic construct
  REGION 1..7: note = Description of Artificial Sequence: Synthetic peptide
DASNRAT

SEQ ID NO: 3134 - protein, 9 aa, synthetic construct
  REGION 1..9: note = Description of Artificial Sequence: Synthetic peptide
QQRSSWPWT

SEQ ID NO: 3135 - protein, 9 aa, synthetic construct
  REGION 1..9: note = Description of Artificial Sequence: Synthetic peptide
GFSLSTYGV

SEQ ID NO: 3136 - protein, 5 aa, synthetic construct
  REGION 1..5: note = Description of Artificial Sequence: Synthetic peptide
YWNDD

SEQ ID NO: 3137 - protein, 9 aa, synthetic construct
  REGION 1..9: note = Description of Artificial Sequence: Synthetic peptide
ESDWSYYFD

SEQ ID NO: 3138 - protein, 7 aa, synthetic construct
  REGION 1..7: note = Description of Artificial Sequence: Synthetic peptide
SQSVSSY

SEQ ID NO: 3139 - skipped

SEQ ID NO: 3140 - protein, 6 aa, synthetic construct
  REGION 1..6: note = Description of Artificial Sequence: Synthetic peptide
RSSWPW

SEQ ID NO: 3141 - protein, 12 aa, synthetic construct
  REGION 1..12: note = Description of Artificial Sequence: Synthetic peptide
GFSLSTYGVGVG

SEQ ID NO: 3142 - protein, 9 aa, synthetic construct
  REGION 1..9: note = Description of Artificial Sequence: Synthetic peptide
LIYWNDDKR

SEQ ID NO: 3143 - protein, 10 aa, synthetic construct
  REGION 1..10: note = Description of Artificial Sequence: Synthetic peptide
ESDWSYYFDY

SEQ ID NO: 3144 - protein, 11 aa, synthetic construct
  REGION 1..11: note = Description of Artificial Sequence: Synthetic peptide
RASQSVSSYLA

SEQ ID NO: 3145 - protein, 7 aa, synthetic construct
  REGION 1..7: note = Description of Artificial Sequence: Synthetic peptide
DASNRAT

SEQ ID NO: 3146 - protein, 9 aa, synthetic construct
  REGION 1..9: note = Description of Artificial Sequence: Synthetic peptide
QQRSSWPWT

SEQ ID NO: 3147 - protein, 8 aa, synthetic construct
  REGION 1..8: note = Description of Artificial Sequence: Synthetic peptide
STYGVGVG

SEQ ID NO: 3148 - protein, 12 aa, synthetic construct
  REGION 1..12: note = Description of Artificial Sequence: Synthetic peptide
WLALIYWNDDKR

SEQ ID NO: 3149 - protein, 11 aa, synthetic construct
  REGION 1..11: note = Description of Artificial Sequence: Synthetic peptide
SHESDWSYYFD

SEQ ID NO: 3150 - protein, 7 aa, synthetic construct
  REGION 1..7: note = Description of Artificial Sequence: Synthetic peptide
SSYLAWY

SEQ ID NO: 3151 - protein, 10 aa, synthetic construct
  REGION 1..10: note = Description of Artificial Sequence: Synthetic peptide
LLIYDASNRA

SEQ ID NO: 3152 - protein, 8 aa, synthetic construct
  REGION 1..8: note = Description of Artificial Sequence: Synthetic peptide
QQRSSWPW

SEQ ID NO: 3153 - protein, 10 aa, synthetic construct
  REGION 1..10: note = Description of Artificial Sequence: Synthetic peptide
GFSLSTYGVG

SEQ ID NO: 3154 - protein, 7 aa, synthetic construct
  REGION 1..7: note = Description of Artificial Sequence: Synthetic peptide
IYWNDDK

SEQ ID NO: 3155 - protein, 12 aa, synthetic construct
  REGION 1..12: note = Description of Artificial Sequence: Synthetic peptide
SHESDWSYYFDY

SEQ ID NO: 3156 - protein, 6 aa, synthetic construct
  REGION 1..6: note = Description of Artificial Sequence: Synthetic peptide
QSVSSY

SEQ ID NO: 3157 - skipped

SEQ ID NO: 3158 - protein, 9 aa, synthetic construct
  REGION 1..9: note = Description of Artificial Sequence: Synthetic peptide
QQRSSWPWT

SEQ ID NO: 3159 - protein, 120 aa, synthetic construct
  REGION 1..120: note = Description of Artificial Sequence: Synthetic polypeptide
QVTLRESGPTLVKPTQTLTLTCTFSGFSLSTYGVGVGWIRQPPGKALEWLALIYWNDDKRYNPSLKSRLTITKDTSKNQVVLTMTNMDPVGTATYYCSHESDWSYYFDYWGQGTMVTVSS

SEQ ID NO: 3160 - protein, 107 aa, synthetic construct
  REGION 1..107: note = Description of Artificial Sequence: Synthetic polypeptide
EIVLTQSPATLSLSPGERATLSCRASQSVSSYLAWYQQKPGLAPRLLIYDASNRATGIPARFSGSGSGTDFTLTISSLEPVDFAVYYCQQRSSWPWTFGQGTKVDIK

SEQ ID NO: 3161 - protein, 450 aa, synthetic construct
  REGION 1..450: note = Description of Artificial Sequence: Synthetic polypeptide
QVTLRESGPTLVKPTQTLTLTCTFSGFSLSTYGVGVGWIRQPPGKALEWLALIYWNDDKRYNPSLKSRLTITKDTSKNQVVLTMTNMDPVGTATYYCSHESDWSYYFDYWGQGTMVTVSSASTKGPSVFPLAPSSKSTSGGTAALGCLVKDYFPEPVTVSWNSGALTSGVHTFPAVLQSSGLYSLSSVVTVPSSSLGTQTYICNVNHKPSNTKVDKKVEPKSCDKTHTCPPCPAPELLGGPSVFLFPPKPKDTLMISRTPEVTCVVVDVSHEDPEVKFNWYVDGVEVHNAKTKPREEQYNSTYRVVSVLTVLHQDWLNGKEYKCKVSNKALPAPIEKTISKAKGQPREPQVYTLPPSREEMTKNQVSLTCLVKGFYPSDIAVEWESNGQPENNYKTTPPVLDSDGSFFLYSKLTVDKSRWQQGNVFSCSVMHEALHNHYTQKSLSLSPGK

SEQ ID NO: 3162 - protein, 214 aa, synthetic construct
  REGION 1..214: note = Description of Artificial Sequence: Synthetic polypeptide
EIVLTQSPATLSLSPGERATLSCRASQSVSSYLAWYQQKPGLAPRLLIYDASNRATGIPARFSGSGSGTDFTLTISSLEPVDFAVYYCQQRSSWPWTFGQGTKVDIKRTVAAPSVFIFPPSDEQLKSGTASVVCLLNNFYPREAKVQWKVDNALQSGNSQESVTEQDSKDSTYSLSSTLTLSKADYEKHKVYACEVTHQGLSSPVTKSFNRGEC

SEQ ID NO: 3163 - protein, 5 aa, synthetic construct
  REGION 1..5: note = Description of Artificial Sequence: Synthetic peptide
SYVIS

SEQ ID NO: 3164 - protein, 17 aa, synthetic construct
  REGION 1..17: note = Description of Artificial Sequence: Synthetic peptide
GILPILSTANYAQKFQG

SEQ ID NO: 3165 - protein, 10 aa, synthetic construct
  REGION 1..10: note = Description of Artificial Sequence: Synthetic peptide
AHDYYYGMDV

SEQ ID NO: 3166 - protein, 16 aa, synthetic construct
  REGION 1..16: note = Description of Artificial Sequence: Synthetic peptide
RSSQSLVHSDGNTYLS

SEQ ID NO: 3167 - protein, 7 aa, synthetic construct
  REGION 1..7: note = Description of Artificial Sequence: Synthetic peptide
KISNRFS

SEQ ID NO: 3168 - protein, 9 aa, synthetic construct
  REGION 1..9: note = Description of Artificial Sequence: Synthetic peptide
MQATHHPLT

SEQ ID NO: 3169 - protein, 7 aa, synthetic construct
  REGION 1..7: note = Description of Artificial Sequence: Synthetic peptide
GGTFSSY

SEQ ID NO: 3170 - protein, 6 aa, synthetic construct
  REGION 1..6: note = Description of Artificial Sequence: Synthetic peptide
LPILST

SEQ ID NO: 3171 - protein, 9 aa, synthetic construct
  REGION 1..9: note = Description of Artificial Sequence: Synthetic peptide
AHDYYYGMD

SEQ ID NO: 3172 - protein, 12 aa, synthetic construct
  REGION 1..12: note = Description of Artificial Sequence: Synthetic peptide
SQSLVHSDGNTY

SEQ ID NO: 3173 - skipped

SEQ ID NO: 3174 - protein, 6 aa, synthetic construct
  REGION 1..6: note = Description of Artificial Sequence: Synthetic peptide
ATHHPL

SEQ ID NO: 3175 - protein, 10 aa, synthetic construct
  REGION 1..10: note = Description of Artificial Sequence: Synthetic peptide
GGTFSSYVIS

SEQ ID NO: 3176 - protein, 10 aa, synthetic construct
  REGION 1..10: note = Description of Artificial Sequence: Synthetic peptide
GILPILSTAN

SEQ ID NO: 3177 - protein, 10 aa, synthetic construct
  REGION 1..10: note = Description of Artificial Sequence: Synthetic peptide
AHDYYYGMDV

SEQ ID NO: 3178 - protein, 16 aa, synthetic construct
  REGION 1..16: note = Description of Artificial Sequence: Synthetic peptide
RSSQSLVHSDGNTYLS

SEQ ID NO: 3179 - protein, 7 aa, synthetic construct
  REGION 1..7: note = Description of Artificial Sequence: Synthetic peptide
KISNRFS

SEQ ID NO: 3180 - protein, 9 aa, synthetic construct
  REGION 1..9: note = Description of Artificial Sequence: Synthetic peptide
MQATHHPLT

SEQ ID NO: 3181 - protein, 6 aa, synthetic construct
  REGION 1..6: note = Description of Artificial Sequence: Synthetic peptide
SSYVIS

SEQ ID NO: 3182 - protein, 13 aa, synthetic construct
  REGION 1..13: note = Description of Artificial Sequence: Synthetic peptide
WMGGILPILSTAN

SEQ ID NO: 3183 - protein, 11 aa, synthetic construct
  REGION 1..11: note = Description of Artificial Sequence: Synthetic peptide
ARAHDYYYGMD

SEQ ID NO: 3184 - protein, 12 aa, synthetic construct
  REGION 1..12: note = Description of Artificial Sequence: Synthetic peptide
VHSDGNTYLSWL

SEQ ID NO: 3185 - protein, 10 aa, synthetic construct
  REGION 1..10: note = Description of Artificial Sequence: Synthetic peptide
LLVYKISNRF

SEQ ID NO: 3186 - protein, 8 aa, synthetic construct
  REGION 1..8: note = Description of Artificial Sequence: Synthetic peptide
MQATHHPL

SEQ ID NO: 3187 - protein, 8 aa, synthetic construct
  REGION 1..8: note = Description of Artificial Sequence: Synthetic peptide
GGTFSSYV

SEQ ID NO: 3188 - protein, 8 aa, synthetic construct
  REGION 1..8: note = Description of Artificial Sequence: Synthetic peptide
ILPILSTA

SEQ ID NO: 3189 - protein, 12 aa, synthetic construct
  REGION 1..12: note = Description of Artificial Sequence: Synthetic peptide
ARAHDYYYGMDV

SEQ ID NO: 3190 - protein, 11 aa, synthetic construct
  REGION 1..11: note = Description of Artificial Sequence: Synthetic peptide
QSLVHSDGNTY

SEQ ID NO: 3191 - skipped

SEQ ID NO: 3192 - protein, 9 aa, synthetic construct
  REGION 1..9: note = Description of Artificial Sequence: Synthetic peptide
MQATHHPLT

SEQ ID NO: 3193 - protein, 119 aa, synthetic construct
  REGION 1..119: note = Description of Artificial Sequence: Synthetic polypeptide
EVQLVQSGAEVKKPGSSVKVSCKASGGTFSSYVISWVRQAPGQGLEWMGGILPILSTANYAQKFQGRVTITADKSTSTAYMELSSLRSEDTAVYYCARAHDYYYGMDVWGQGTMVTVSS

SEQ ID NO: 3194 - protein, 112 aa, synthetic construct
  REGION 1..112: note = Description of Artificial Sequence: Synthetic polypeptide
DIVMTQTPLSSPVTLGQPASISCRSSQSLVHSDGNTYLSWLQQRPGQPPRLLVYKISNRFSGVPDRFSGSGAGTDFTLKISRVEAEDVGIYYCMQATHHPLTFGGGTKLEIK

SEQ ID NO: 3195 - protein, 449 aa, synthetic construct
  REGION 1..449: note = Description of Artificial Sequence: Synthetic polypeptide
EVQLVQSGAEVKKPGSSVKVSCKASGGTFSSYVISWVRQAPGQGLEWMGGILPILSTANYAQKFQGRVTITADKSTSTAYMELSSLRSEDTAVYYCARAHDYYYGMDVWGQGTMVTVSSASTKGPSVFPLAPSSKSTSGGTAALGCLVKDYFPEPVTVSWNSGALTSGVHTFPAVLQSSGLYSLSSVVTVPSSSLGTQTYICNVNHKPSNTKVDKKVEPKSCDKTHTCPPCPAPELLGGPSVFLFPPKPKDTLMISRTPEVTCVVVDVSHEDPEVKFNWYVDGVEVHNAKTKPREEQYNSTYRVVSVLTVLHQDWLNGKEYKCKVSNKALPAPIEKTISKAKGQPREPQVYTLPPSREEMTKNQVSLTCLVKGFYPSDIAVEWESNGQPENNYKTTPPVLDSDGSFFLYSKLTVDKSRWQQGNVFSCSVMHEALHNHYTQKSLSLSPGK

SEQ ID NO: 3196 - protein, 219 aa, synthetic construct
  REGION 1..219: note = Description of Artificial Sequence: Synthetic polypeptide
DIVMTQTPLSSPVTLGQPASISCRSSQSLVHSDGNTYLSWLQQRPGQPPRLLVYKISNRFSGVPDRFSGSGAGTDFTLKISRVEAEDVGIYYCMQATHHPLTFGGGTKLEIKRTVAAPSVFIFPPSDEQLKSGTASVVCLLNNFYPREAKVQWKVDNALQSGNSQESVTEQDSKDSTYSLSSTLTLSKADYEKHKVYACEVTHQGLSSPVTKSFNRGEC

SEQ ID NO: 3197 - protein, 5 aa, synthetic construct
  REGION 1..5: note = Description of Artificial Sequence: Synthetic peptide
NYYWS

SEQ ID NO: 3198 - protein, 16 aa, synthetic construct
  REGION 1..16: note = Description of Artificial Sequence: Synthetic peptide
RIYSSGITNYNPSLKS

SEQ ID NO: 3199 - protein, 10 aa, synthetic construct
  REGION 1..10: note = Description of Artificial Sequence: Synthetic peptide
IVGVKGAFAI

SEQ ID NO: 3200 - protein, 14 aa, synthetic construct
  REGION 1..14: note = Description of Artificial Sequence: Synthetic peptide
TGTSSDVGGYNYVS

SEQ ID NO: 3201 - protein, 7 aa, synthetic construct
  REGION 1..7: note = Description of Artificial Sequence: Synthetic peptide
EVSNRPS

SEQ ID NO: 3202 - protein, 9 aa, synthetic construct
  REGION 1..9: note = Description of Artificial Sequence: Synthetic peptide
SSYTSTSVV

SEQ ID NO: 3203 - protein, 7 aa, synthetic construct
  REGION 1..7: note = Description of Artificial Sequence: Synthetic peptide
GGSISNY

SEQ ID NO: 3204 - protein, 5 aa, synthetic construct
  REGION 1..5: note = Description of Artificial Sequence: Synthetic peptide
YSSGI

SEQ ID NO: 3205 - protein, 9 aa, synthetic construct
  REGION 1..9: note = Description of Artificial Sequence: Synthetic peptide
IVGVKGAFA

SEQ ID NO: 3206 - protein, 10 aa, synthetic construct
  REGION 1..10: note = Description of Artificial Sequence: Synthetic peptide
TSSDVGGYNY

SEQ ID NO: 3207 - skipped

SEQ ID NO: 3208 - protein, 6 aa, synthetic construct
  REGION 1..6: note = Description of Artificial Sequence: Synthetic peptide
YTSTSV

SEQ ID NO: 3209 - protein, 10 aa, synthetic construct
  REGION 1..10: note = Description of Artificial Sequence: Synthetic peptide
GGSISNYYWS

SEQ ID NO: 3210 - protein, 9 aa, synthetic construct
  REGION 1..9: note = Description of Artificial Sequence: Synthetic peptide
RIYSSGITN

SEQ ID NO: 3211 - protein, 10 aa, synthetic construct
  REGION 1..10: note = Description of Artificial Sequence: Synthetic peptide
IVGVKGAFAI

SEQ ID NO: 3212 - protein, 14 aa, synthetic construct
  REGION 1..14: note = Description of Artificial Sequence: Synthetic peptide
TGTSSDVGGYNYVS

SEQ ID NO: 3213 - protein, 7 aa, synthetic construct
  REGION 1..7: note = Description of Artificial Sequence: Synthetic peptide
EVSNRPS

SEQ ID NO: 3214 - protein, 9 aa, synthetic construct
  REGION 1..9: note = Description of Artificial Sequence: Synthetic peptide
SSYTSTSVV

SEQ ID NO: 3215 - protein, 6 aa, synthetic construct
  REGION 1..6: note = Description of Artificial Sequence: Synthetic peptide
SNYYWS

SEQ ID NO: 3216 - protein, 12 aa, synthetic construct
  REGION 1..12: note = Description of Artificial Sequence: Synthetic peptide
WIGRIYSSGITN

SEQ ID NO: 3217 - protein, 11 aa, synthetic construct
  REGION 1..11: note = Description of Artificial Sequence: Synthetic peptide
AGIVGVKGAFA

SEQ ID NO: 3218 - protein, 10 aa, synthetic construct
  REGION 1..10: note = Description of Artificial Sequence: Synthetic peptide
VGGYNYVSWY

SEQ ID NO: 3219 - protein, 10 aa, synthetic construct
  REGION 1..10: note = Description of Artificial Sequence: Synthetic peptide
LMIYEVSNRP

SEQ ID NO: 3220 - protein, 8 aa, synthetic construct
  REGION 1..8: note = Description of Artificial Sequence: Synthetic peptide
SSYTSTSV

SEQ ID NO: 3221 - protein, 8 aa, synthetic construct
  REGION 1..8: note = Description of Artificial Sequence: Synthetic peptide
GGSISNYY

SEQ ID NO: 3222 - protein, 7 aa, synthetic construct
  REGION 1..7: note = Description of Artificial Sequence: Synthetic peptide
IYSSGIT

SEQ ID NO: 3223 - protein, 12 aa, synthetic construct
  REGION 1..12: note = Description of Artificial Sequence: Synthetic peptide
AGIVGVKGAFAI

SEQ ID NO: 3224 - protein, 9 aa, synthetic construct
  REGION 1..9: note = Description of Artificial Sequence: Synthetic peptide
SSDVGGYNY

SEQ ID NO: 3225 - skipped

SEQ ID NO: 3226 - protein, 9 aa, synthetic construct
  REGION 1..9: note = Description of Artificial Sequence: Synthetic peptide
SSYTSTSVV

SEQ ID NO: 3227 - protein, 118 aa, synthetic construct
  REGION 1..118: note = Description of Artificial Sequence: Synthetic polypeptide
QVQLVQSGPGLVKPSETLSLTCTVSGGSISNYYWSWIRQPAGKGLGWIGRIYSSGITNYNPSLKSRVTMSVDTSKNQLSLKLSSVTAADTAVYYCAGIVGVKGAFAIWGQGTMVTVSS

SEQ ID NO: 3228 - protein, 109 aa, synthetic construct; identical to SEQ ID NO: 3058
  REGION 1..109: note = Description of Artificial Sequence: Synthetic polypeptide

SEQ ID NO: 3229 - protein, 448 aa, synthetic construct
  REGION 1..448: note = Description of Artificial Sequence: Synthetic polypeptide
QVQLVQSGPGLVKPSETLSLTCTVSGGSISNYYWSWIRQPAGKGLGWIGRIYSSGITNYNPSLKSRVTMSVDTSKNQLSLKLSSVTAADTAVYYCAGIVGVKGAFAIWGQGTMVTVSSASTKGPSVFPLAPSSKSTSGGTAALGCLVKDYFPEPVTVSWNSGALTSGVHTFPAVLQSSGLYSLSSVVTVPSSSLGTQTYICNVNHKPSNTKVDKKVEPKSCDKTHTCPPCPAPELLGGPSVFLFPPKPKDTLMISRTPEVTCVVVDVSHEDPEVKFNWYVDGVEVHNAKTKPREEQYNSTYRVVSVLTVLHQDWLNGKEYKCKVSNKALPAPIEKTISKAKGQPREPQVYTLPPSREEMTKNQVSLTCLVKGFYPSDIAVEWESNGQPENNYKTTPPVLDSDGSFFLYSKLTVDKSRWQQGNVFSCSVMHEALHNHYTQKSLSLSPGK

SEQ ID NO: 3230 - protein, 215 aa, synthetic construct; identical to SEQ ID NO: 3060
  REGION 1..215: note = Description of Artificial Sequence: Synthetic polypeptide

SEQ ID NO: 3231 - protein, 5 aa, synthetic construct
  REGION 1..5: note = Description of Artificial Sequence: Synthetic peptide
SYDMN

SEQ ID NO: 3232 - protein, 17 aa, synthetic construct
  REGION 1..17: note = Description of Artificial Sequence: Synthetic peptide
YISSSSTAKYYADSVKG

SEQ ID NO: 3233 - protein, 12 aa, synthetic construct
  REGION 1..12: note = Description of Artificial Sequence: Synthetic peptide
EDIVVVTPILQH

SEQ ID NO: 3234 - protein, 11 aa, synthetic construct
  REGION 1..11: note = Description of Artificial Sequence: Synthetic peptide
RASQSVSNYLA

SEQ ID NO: 3235 - protein, 7 aa, synthetic construct
  REGION 1..7: note = Description of Artificial Sequence: Synthetic peptide
DASNRAT

SEQ ID NO: 3236 - protein, 7 aa, synthetic construct
  REGION 1..7: note = Description of Artificial Sequence: Synthetic peptide
QQRSNWT

SEQ ID NO: 3237 - protein, 7 aa, synthetic construct
  REGION 1..7: note = Description of Artificial Sequence: Synthetic peptide
GFTFSSY

SEQ ID NO: 3238 - protein, 6 aa, synthetic construct
  REGION 1..6: note = Description of Artificial Sequence: Synthetic peptide
SSSSTA

SEQ ID NO: 3239 - protein, 11 aa, synthetic construct
  REGION 1..11: note = Description of Artificial Sequence: Synthetic peptide
EDIVVVTPILQ

SEQ ID NO: 3240 - protein, 7 aa, synthetic construct
  REGION 1..7: note = Description of Artificial Sequence: Synthetic peptide
SQSVSNY

SEQ ID NO: 3241 - skipped

SEQ ID NO: 3242 - protein, 4 aa, synthetic construct
  REGION 1..4: note = Description of Artificial Sequence: Synthetic peptide
RSNW

SEQ ID NO: 3243 - protein, 10 aa, synthetic construct
  REGION 1..10: note = Description of Artificial Sequence: Synthetic peptide
GFTFSSYDMN

SEQ ID NO: 3244 - protein, 10 aa, synthetic construct
  REGION 1..10: note = Description of Artificial Sequence: Synthetic peptide
YISSSSTAKY

SEQ ID NO: 3245 - protein, 12 aa, synthetic construct
  REGION 1..12: note = Description of Artificial Sequence: Synthetic peptide
EDIVVVTPILQH

SEQ ID NO: 3246 - protein, 11 aa, synthetic construct
  REGION 1..11: note = Description of Artificial Sequence: Synthetic peptide
RASQSVSNYLA

SEQ ID NO: 3247 - protein, 7 aa, synthetic construct
  REGION 1..7: note = Description of Artificial Sequence: Synthetic peptide
DASNRAT

SEQ ID NO: 3248 - protein, 7 aa, synthetic construct
  REGION 1..7: note = Description of Artificial Sequence: Synthetic peptide
QQRSNWT

SEQ ID NO: 3249 - protein, 6 aa, synthetic construct
  REGION 1..6: note = Description of Artificial Sequence: Synthetic peptide
SSYDMN

SEQ ID NO: 3250 - protein, 13 aa, synthetic construct
  REGION 1..13: note = Description of Artificial Sequence: Synthetic peptide
WVSYISSSSTAKY

SEQ ID NO: 3251 - protein, 13 aa, synthetic construct
  REGION 1..13: note = Description of Artificial Sequence: Synthetic peptide
AREDIVVVTPILQ

SEQ ID NO: 3252 - protein, 7 aa, synthetic construct
  REGION 1..7: note = Description of Artificial Sequence: Synthetic peptide
SNYLAWY

SEQ ID NO: 3253 - protein, 10 aa, synthetic construct
  REGION 1..10: note = Description of Artificial Sequence: Synthetic peptide
LLIYDASNRA

SEQ ID NO: 3254 - protein, 6 aa, synthetic construct
  REGION 1..6: note = Description of Artificial Sequence: Synthetic peptide
QQRSNW

SEQ ID NO: 3255 - protein, 8 aa, synthetic construct
  REGION 1..8: note = Description of Artificial Sequence: Synthetic peptide
GFTFSSYD

SEQ ID NO: 3256 - protein, 8 aa, synthetic construct
  REGION 1..8: note = Description of Artificial Sequence: Synthetic peptide
ISSSSTAK

SEQ ID NO: 3257 - protein, 14 aa, synthetic construct
  REGION 1..14: note = Description of Artificial Sequence: Synthetic peptide
AREDIVVVTPILQH

SEQ ID NO: 3258 - protein, 6 aa, synthetic construct
  REGION 1..6: note = Description of Artificial Sequence: Synthetic peptide
QSVSNY

SEQ ID NO: 3259 - skipped

SEQ ID NO: 3260 - protein, 7 aa, synthetic construct
  REGION 1..7: note = Description of Artificial Sequence: Synthetic peptide
QQRSNWT

SEQ ID NO: 3261 - protein, 121 aa, synthetic construct
  REGION 1..121: note = Description of Artificial Sequence: Synthetic polypeptide
QVQLVQSGGTLVQPGGSLRLSCAVSGFTFSSYDMNWVRQAPGKGLEWVSYISSSSTAKYYADSVKGRFTISRDNAKNSLYLQMNSLWDEDTAVYYCAREDIVVVTPILQHWGQGTLVTVSS

SEQ ID NO: 3262 - protein, 105 aa, synthetic construct
  REGION 1..105: note = Description of Artificial Sequence: Synthetic polypeptide
EIVMTQSPATLSLSPGERATLSCRASQSVSNYLAWYQQKSGQAPRLLIYDASNRATGIPARFSGSGSGTDFTLTISSLEPEDFAVYCCQQRSNWTFGQGTRLEIK

SEQ ID NO: 3263 - protein, 451 aa, synthetic construct
  REGION 1..451: note = Description of Artificial Sequence: Synthetic polypeptide
QVQLVQSGGTLVQPGGSLRLSCAVSGFTFSSYDMNWVRQAPGKGLEWVSYISSSSTAKYYADSVKGRFTISRDNAKNSLYLQMNSLWDEDTAVYYCAREDIVVVTPILQHWGQGTLVTVSSASTKGPSVFPLAPSSKSTSGGTAALGCLVKDYFPEPVTVSWNSGALTSGVHTFPAVLQSSGLYSLSSVVTVPSSSLGTQTYICNVNHKPSNTKVDKKVEPKSCDKTHTCPPCPAPELLGGPSVFLFPPKPKDTLMISRTPEVTCVVVDVSHEDPEVKFNWYVDGVEVHNAKTKPREEQYNSTYRVVSVLTVLHQDWLNGKEYKCKVSNKALPAPIEKTISKAKGQPREPQVYTLPPSREEMTKNQVSLTCLVKGFYPSDIAVEWESNGQPENNYKTTPPVLDSDGSFFLYSKLTVDKSRWQQGNVFSCSVMHEALHNHYTQKSLSLSPGK

SEQ ID NO: 3264 - protein, 212 aa, synthetic construct
  REGION 1..212: note = Description of Artificial Sequence: Synthetic polypeptide
EIVMTQSPATLSLSPGERATLSCRASQSVSNYLAWYQQKSGQAPRLLIYDASNRATGIPARFSGSGSGTDFTLTISSLEPEDFAVYCCQQRSNWTFGQGTRLEIKRTVAAPSVFIFPPSDEQLKSGTASVVCLLNNFYPREAKVQWKVDNALQSGNSQESVTEQDSKDSTYSLSSTLTLSKADYEKHKVYACEVTHQGLSSPVTKSFNRGEC

SEQ ID NO: 3265 - protein, 5 aa, synthetic construct
  REGION 1..5: note = Description of Artificial Sequence: Synthetic peptide
NHGMS

SEQ ID NO: 3266 - protein, 17 aa, synthetic construct
  REGION 1..17: note = Description of Artificial Sequence: Synthetic peptide
SITRGGDTTYYPDNVKG

SEQ ID NO: 3267 - protein, 11 aa, synthetic construct
  REGION 1..11: note = Description of Artificial Sequence: Synthetic peptide
GPLTVGYAMDY

SEQ ID NO: 3268 - protein, 13 aa, synthetic construct
  REGION 1..13: note = Description of Artificial Sequence: Synthetic peptide
SGNSSNIGHNYVS

SEQ ID NO: 3269 - protein, 7 aa, synthetic construct
  REGION 1..7: note = Description of Artificial Sequence: Synthetic peptide
DNNQRPS

SEQ ID NO: 3270 - protein, 11 aa, synthetic construct
  REGION 1..11: note = Description of Artificial Sequence: Synthetic peptide
GIWDSSLSIVV

SEQ ID NO: 3271 - protein, 7 aa, synthetic construct
  REGION 1..7: note = Description of Artificial Sequence: Synthetic peptide
GFTFSNH

SEQ ID NO: 3272 - protein, 6 aa, synthetic construct
  REGION 1..6: note = Description of Artificial Sequence: Synthetic peptide
TRGGDT

SEQ ID NO: 3273 - protein, 10 aa, synthetic construct
  REGION 1..10: note = Description of Artificial Sequence: Synthetic peptide
GPLTVGYAMD

SEQ ID NO: 3274 - protein, 9 aa, synthetic construct
  REGION 1..9: note = Description of Artificial Sequence: Synthetic peptide
NSSNIGHNY

SEQ ID NO: 3275 - skipped

SEQ ID NO: 3276 - protein, 8 aa, synthetic construct
  REGION 1..8: note = Description of Artificial Sequence: Synthetic peptide
WDSSLSIV

SEQ ID NO: 3277 - protein, 10 aa, synthetic construct
  REGION 1..10: note = Description of Artificial Sequence: Synthetic peptide
GFTFSNHGMS

SEQ ID NO: 3278 - protein, 10 aa, synthetic construct
  REGION 1..10: note = Description of Artificial Sequence: Synthetic peptide
SITRGGDTTY

SEQ ID NO: 3279 - protein, 11 aa, synthetic construct
  REGION 1..11: note = Description of Artificial Sequence: Synthetic peptide
GPLTVGYAMDY

SEQ ID NO: 3280 - protein, 13 aa, synthetic construct
  REGION 1..13: note = Description of Artificial Sequence: Synthetic peptide
SGNSSNIGHNYVS

SEQ ID NO: 3281 - protein, 7 aa, synthetic construct
  REGION 1..7: note = Description of Artificial Sequence: Synthetic peptide
DNNQRPS

SEQ ID NO: 3282 - protein, 11 aa, synthetic construct
  REGION 1..11: note = Description of Artificial Sequence: Synthetic peptide
GIWDSSLSIVV

SEQ ID NO: 3283 - protein, 6 aa, synthetic construct
  REGION 1..6: note = Description of Artificial Sequence: Synthetic peptide
SNHGMS

SEQ ID NO: 3284 - protein, 13 aa, synthetic construct
  REGION 1..13: note = Description of Artificial Sequence: Synthetic peptide
WVASITRGGDTTY

SEQ ID NO: 3285 - protein, 12 aa, synthetic construct
  REGION 1..12: note = Description of Artificial Sequence: Synthetic peptide
TRGPLTVGYAMD

SEQ ID NO: 3286 - protein, 9 aa, synthetic construct
  REGION 1..9: note = Description of Artificial Sequence: Synthetic peptide
IGHNYVSWY

SEQ ID NO: 3287 - protein, 10 aa, synthetic construct
  REGION 1..10: note = Description of Artificial Sequence: Synthetic peptide
LLIYDNNQRP

SEQ ID NO: 3288 - protein, 10 aa, synthetic construct
  REGION 1..10: note = Description of Artificial Sequence: Synthetic peptide
GIWDSSLSIV

SEQ ID NO: 3289 - protein, 8 aa, synthetic construct
  REGION 1..8: note = Description of Artificial Sequence: Synthetic peptide
GFTFSNHG

SEQ ID NO: 3290 - protein, 8 aa, synthetic construct
  REGION 1..8: note = Description of Artificial Sequence: Synthetic peptide
ITRGGDTT

SEQ ID NO: 3291 - protein, 13 aa, synthetic construct
  REGION 1..13: note = Description of Artificial Sequence: Synthetic peptide
TRGPLTVGYAMDY

SEQ ID NO: 3292 - protein, 8 aa, synthetic construct
  REGION 1..8: note = Description of Artificial Sequence: Synthetic peptide
SSNIGHNY

SEQ ID NO: 3293 - skipped

SEQ ID NO: 3294 - protein, 11 aa, synthetic construct
  REGION 1..11: note = Description of Artificial Sequence: Synthetic peptide
GIWDSSLSIVV

SEQ ID NO: 3295 - protein, 120 aa, synthetic construct
  REGION 1..120: note = Description of Artificial Sequence: Synthetic polypeptide
QVQLVQSGGGLVKPGASLKLSCAASGFTFSNHGMSWVRQTSDKRLEWVASITRGGDTTYYPDNVKGRFTISRENAKNTLYLQMSSLKSDDTALYYCTRGPLTVGYAMDYWGQGTTVTVSS

SEQ ID NO: 3296 - protein, 110 aa, synthetic construct
  REGION 1..110: note = Description of Artificial Sequence: Synthetic polypeptide
QLVLTQPPSVSAAPGQKVTISCSGNSSNIGHNYVSWYQQLPGTAPKLLIYDNNQRPSGIPDRFSGSKSDTSATLGITGLQTGDEADYYCGIWDSSLSIVVFGGGTKVTVL

SEQ ID NO: 3297 - protein, 450 aa, synthetic construct
  REGION 1..450: note = Description of Artificial Sequence: Synthetic polypeptide
QVQLVQSGGGLVKPGASLKLSCAASGFTFSNHGMSWVRQTSDKRLEWVASITRGGDTTYYPDNVKGRFTISRENAKNTLYLQMSSLKSDDTALYYCTRGPLTVGYAMDYWGQGTTVTVSSASTKGPSVFPLAPSSKSTSGGTAALGCLVKDYFPEPVTVSWNSGALTSGVHTFPAVLQSSGLYSLSSVVTVPSSSLGTQTYICNVNHKPSNTKVDKKVEPKSCDKTHTCPPCPAPELLGGPSVFLFPPKPKDTLMISRTPEVTCVVVDVSHEDPEVKFNWYVDGVEVHNAKTKPREEQYNSTYRVVSVLTVLHQDWLNGKEYKCKVSNKALPAPIEKTISKAKGQPREPQVYTLPPSREEMTKNQVSLTCLVKGFYPSDIAVEWESNGQPENNYKTTPPVLDSDGSFFLYSKLTVDKSRWQQGNVFSCSVMHEALHNHYTQKSLSLSPGK

SEQ ID NO: 3298 - protein, 216 aa, synthetic construct
  REGION 1..216: note = Description of Artificial Sequence: Synthetic polypeptide
QLVLTQPPSVSAAPGQKVTISCSGNSSNIGHNYVSWYQQLPGTAPKLLIYDNNQRPSGIPDRFSGSKSDTSATLGITGLQTGDEADYYCGIWDSSLSIVVFGGGTKVTVLGQPKAAPSVTLFPPSSEELQANKATLVCLISDFYPGAVTVAWKADSSPVKAGVETTTPSKQSNNKYAASSYLSLTPEQWKSHRSYSCQVTHEGSTVEKTVAPTECS

SEQ ID NO: 3299 - protein, 5 aa, synthetic construct
  REGION 1..5: note = Description of Artificial Sequence: Synthetic peptide
NYYWS

SEQ ID NO: 3300 - protein, 16 aa, synthetic construct
  REGION 1..16: note = Description of Artificial Sequence: Synthetic peptide
RIYSSGITNYNPSLKS

SEQ ID NO: 3301 - protein, 10 aa, synthetic construct
  REGION 1..10: note = Description of Artificial Sequence: Synthetic peptide
IVGVKGAFAI

SEQ ID NO: 3302 - protein, 14 aa, synthetic construct
  REGION 1..14: note = Description of Artificial Sequence: Synthetic peptide
TGTSSDVGGYNYVS

SEQ ID NO: 3303 - protein, 7 aa, synthetic construct
  REGION 1..7: note = Description of Artificial Sequence: Synthetic peptide
EVSNRPS

SEQ ID NO: 3304 - protein, 9 aa, synthetic construct
  REGION 1..9: note = Description of Artificial Sequence: Synthetic peptide
SSYTSTSVV

SEQ ID NO: 3305 - protein, 7 aa, synthetic construct
  REGION 1..7: note = Description of Artificial Sequence: Synthetic peptide
GGSISNY

SEQ ID NO: 3306 - protein, 5 aa, synthetic construct
  REGION 1..5: note = Description of Artificial Sequence: Synthetic peptide
YSSGI

SEQ ID NO: 3307 - protein, 9 aa, synthetic construct
  REGION 1..9: note = Description of Artificial Sequence: Synthetic peptide
IVGVKGAFA

SEQ ID NO: 3308 - protein, 10 aa, synthetic construct
  REGION 1..10: note = Description of Artificial Sequence: Synthetic peptide
TSSDVGGYNY

SEQ ID NO: 3309 - skipped

SEQ ID NO: 3310 - protein, 6 aa, synthetic construct
  REGION 1..6: note = Description of Artificial Sequence: Synthetic peptide
YTSTSV

SEQ ID NO: 3311 - protein, 10 aa, synthetic construct
  REGION 1..10: note = Description of Artificial Sequence: Synthetic peptide
GGSISNYYWS

SEQ ID NO: 3312 - protein, 9 aa, synthetic construct
  REGION 1..9: note = Description of Artificial Sequence: Synthetic peptide
RIYSSGITN

SEQ ID NO: 3313 - protein, 10 aa, synthetic construct
  REGION 1..10: note = Description of Artificial Sequence: Synthetic peptide
IVGVKGAFAI

SEQ ID NO: 3314 - protein, 14 aa, synthetic construct
  REGION 1..14: note = Description of Artificial Sequence: Synthetic peptide
TGTSSDVGGYNYVS

SEQ ID NO: 3315 - protein, 7 aa, synthetic construct
  REGION 1..7: note = Description of Artificial Sequence: Synthetic peptide
EVSNRPS

SEQ ID NO: 3316 - protein, 9 aa, synthetic construct
  REGION 1..9: note = Description of Artificial Sequence: Synthetic peptide
SSYTSTSVV

SEQ ID NO: 3317 - protein, 6 aa, synthetic construct
  REGION 1..6: note = Description of Artificial Sequence: Synthetic peptide
SNYYWS

SEQ ID NO: 3318 - protein, 12 aa, synthetic construct
  REGION 1..12: note = Description of Artificial Sequence: Synthetic peptide
WIGRIYSSGITN

SEQ ID NO: 3319 - protein, 11 aa, synthetic construct
  REGION 1..11: note = Description of Artificial Sequence: Synthetic peptide
AGIVGVKGAFA

SEQ ID NO: 3320 - protein, 10 aa, synthetic construct
  REGION 1..10: note = Description of Artificial Sequence: Synthetic peptide
VGGYNYVSWY

SEQ ID NO: 3321 - protein, 10 aa, synthetic construct
  REGION 1..10: note = Description of Artificial Sequence: Synthetic peptide
LMIYEVSNRP

SEQ ID NO: 3322 - protein, 8 aa, synthetic construct
  REGION 1..8: note = Description of Artificial Sequence: Synthetic peptide
SSYTSTSV

SEQ ID NO: 3323 - protein, 8 aa, synthetic construct
  REGION 1..8: note = Description of Artificial Sequence: Synthetic peptide
GGSISNYY

SEQ ID NO: 3324 - protein, 7 aa, synthetic construct
  REGION 1..7: note = Description of Artificial Sequence: Synthetic peptide
IYSSGIT

SEQ ID NO: 3325 - protein, 12 aa, synthetic construct
  REGION 1..12: note = Description of Artificial Sequence: Synthetic peptide
AGIVGVKGAFAI

SEQ ID NO: 3326 - protein, 9 aa, synthetic construct
  REGION 1..9: note = Description of Artificial Sequence: Synthetic peptide
SSDVGGYNY

SEQ ID NO: 3327 - skipped

SEQ ID NO: 3328 - protein, 9 aa, synthetic construct
  REGION 1..9: note = Description of Artificial Sequence: Synthetic peptide
SSYTSTSVV

SEQ ID NO: 3329 - protein, 118 aa, synthetic construct
  REGION 1..118: note = Description of Artificial Sequence: Synthetic polypeptide
QVQLQESGPGLVKPSETLSLTCTVSGGSISNYYWSWIRQPAGKGLGWIGRIYSSGITNYNPSLKSRVTMSVDTSKNQLSLKLSSVTAADTAVYYCAGIVGVKGAFAIWGQGTMVTVSS

SEQ ID NO: 3330 - protein, 109 aa, synthetic construct
  REGION 1..109: note = Description of Artificial Sequence: Synthetic polypeptide
QAVLTQPASVSGSPGQSITISCTGTSSDVGGYNYVSWYQQHPGKAPKLMIYEVSNRPSGVSNRFSGSKSGNTASLTISGLQAEDEADYYCSSYTSTSVVFGGGTKLTVL

SEQ ID NO: 3331 - protein, 448 aa, synthetic construct
  REGION 1..448: note = Description of Artificial Sequence: Synthetic polypeptide
QVQLQESGPGLVKPSETLSLTCTVSGGSISNYYWSWIRQPAGKGLGWIGRIYSSGITNYNPSLKSRVTMSVDTSKNQLSLKLSSVTAADTAVYYCAGIVGVKGAFAIWGQGTMVTVSSASTKGPSVFPLAPSSKSTSGGTAALGCLVKDYFPEPVTVSWNSGALTSGVHTFPAVLQSSGLYSLSSVVTVPSSSLGTQTYICNVNHKPSNTKVDKKVEPKSCDKTHTCPPCPAPELLGGPSVFLFPPKPKDTLMISRTPEVTCVVVDVSHEDPEVKFNWYVDGVEVHNAKTKPREEQYNSTYRVVSVLTVLHQDWLNGKEYKCKVSNKALPAPIEKTISKAKGQPREPQVYTLPPSREEMTKNQVSLTCLVKGFYPSDIAVEWESNGQPENNYKTTPPVLDSDGSFFLYSKLTVDKSRWQQGNVFSCSVMHEALHNHYTQKSLSLSPGK

SEQ ID NO: 3332 - protein, 215 aa, synthetic construct
  REGION 1..215: note = Description of Artificial Sequence: Synthetic polypeptide
QAVLTQPASVSGSPGQSITISCTGTSSDVGGYNYVSWYQQHPGKAPKLMIYEVSNRPSGVSNRFSGSKSGNTASLTISGLQAEDEADYYCSSYTSTSVVFGGGTKLTVLGQPKAAPSVTLFPPSSEELQANKATLVCLISDFYPGAVTVAWKADSSPVKAGVETTTPSKQSNNKYAASSYLSLTPEQWKSHRSYSCQVTHEGSTVEKTVAPTECS

SEQ ID NO: 3333 - protein, 5 aa, synthetic construct
  REGION 1..5: note = Description of Artificial Sequence: Synthetic peptide
NYYWS

SEQ ID NO: 3334 - protein, 16 aa, synthetic construct
  REGION 1..16: note = Description of Artificial Sequence: Synthetic peptide
RIYSSGITNYNPSLKS

SEQ ID NO: 3335 - protein, 10 aa, synthetic construct
  REGION 1..10: note = Description of Artificial Sequence: Synthetic peptide
IVGVKGAFAI

SEQ ID NO: 3336 - protein, 14 aa, synthetic construct
  REGION 1..14: note = Description of Artificial Sequence: Synthetic peptide
TGTSSDVGGYNYVS

SEQ ID NO: 3337 - protein, 7 aa, synthetic construct
  REGION 1..7: note = Description of Artificial Sequence: Synthetic peptide
EVSNRPS

SEQ ID NO: 3338 - protein, 9 aa, synthetic construct
  REGION 1..9: note = Description of Artificial Sequence: Synthetic peptide
SSYTSTSVV

SEQ ID NO: 3339 - protein, 7 aa, synthetic construct
  REGION 1..7: note = Description of Artificial Sequence: Synthetic peptide
GGSISNY

SEQ ID NO: 3340 - protein, 5 aa, synthetic construct
  REGION 1..5: note = Description of Artificial Sequence: Synthetic peptide
YSSGI

SEQ ID NO: 3341 - protein, 9 aa, synthetic construct
  REGION 1..9: note = Description of Artificial Sequence: Synthetic peptide
IVGVKGAFA

SEQ ID NO: 3342 - protein, 10 aa, synthetic construct
  REGION 1..10: note = Description of Artificial Sequence: Synthetic peptide
TSSDVGGYNY

SEQ ID NO: 3343 - skipped

SEQ ID NO: 3344 - protein, 6 aa, synthetic construct
  REGION 1..6: note = Description of Artificial Sequence: Synthetic peptide
YTSTSV

SEQ ID NO: 3345 - protein, 10 aa, synthetic construct
  REGION 1..10: note = Description of Artificial Sequence: Synthetic peptide
GGSISNYYWS

SEQ ID NO: 3346 - protein, 9 aa, synthetic construct
  REGION 1..9: note = Description of Artificial Sequence: Synthetic peptide
RIYSSGITN

SEQ ID NO: 3347 - protein, 10 aa, synthetic construct
  REGION 1..10: note = Description of Artificial Sequence: Synthetic peptide
IVGVKGAFAI

SEQ ID NO: 3348 - protein, 14 aa, synthetic construct
  REGION 1..14: note = Description of Artificial Sequence: Synthetic peptide
TGTSSDVGGYNYVS

SEQ ID NO: 3349 - protein, 7 aa, synthetic construct
  REGION 1..7: note = Description of Artificial Sequence: Synthetic peptide
EVSNRPS

SEQ ID NO: 3350 - protein, 9 aa, synthetic construct
  REGION 1..9: note = Description of Artificial Sequence: Synthetic peptide
SSYTSTSVV

SEQ ID NO: 3351 - protein, 6 aa, synthetic construct
  REGION 1..6: note = Description of Artificial Sequence: Synthetic peptide
SNYYWS

SEQ ID NO: 3352 - protein, 12 aa, synthetic construct
  REGION 1..12: note = Description of Artificial Sequence: Synthetic peptide
WIGRIYSSGITN

SEQ ID NO: 3353 - protein, 11 aa, synthetic construct
  REGION 1..11: note = Description of Artificial Sequence: Synthetic peptide
AGIVGVKGAFA

SEQ ID NO: 3354 - protein, 10 aa, synthetic construct
  REGION 1..10: note = Description of Artificial Sequence: Synthetic peptide
VGGYNYVSWY

SEQ ID NO: 3355 - protein, 10 aa, synthetic construct
  REGION 1..10: note = Description of Artificial Sequence: Synthetic peptide
LMIYEVSNRP

SEQ ID NO: 3356 - protein, 8 aa, synthetic construct
  REGION 1..8: note = Description of Artificial Sequence: Synthetic peptide
SSYTSTSV

SEQ ID NO: 3357 - protein, 8 aa, synthetic construct
  REGION 1..8: note = Description of Artificial Sequence: Synthetic peptide
GGSISNYY

SEQ ID NO: 3358 - protein, 7 aa, synthetic construct
  REGION 1..7: note = Description of Artificial Sequence: Synthetic peptide
IYSSGIT

SEQ ID NO: 3359 - protein, 12 aa, synthetic construct
  REGION 1..12: note = Description of Artificial Sequence: Synthetic peptide
AGIVGVKGAFAI

SEQ ID NO: 3360 - protein, 9 aa, synthetic construct
  REGION 1..9: note = Description of Artificial Sequence: Synthetic peptide
SSDVGGYNY

SEQ ID NO: 3361 - skipped

SEQ ID NO: 3362 - protein, 9 aa, synthetic construct
  REGION 1..9: note = Description of Artificial Sequence: Synthetic peptide
SSYTSTSVV

SEQ ID NO: 3363 - protein, 118 aa, synthetic construct; identical to SEQ ID NO: 3057
  REGION 1..118: note = Description of Artificial Sequence: Synthetic polypeptide

SEQ ID NO: 3364 - protein, 109 aa, synthetic construct
  REGION 1..109: note = Description of Artificial Sequence: Synthetic polypeptide
QSALTQPASVSGSPGQSITISCTGTSSDVGGYNYVSWYQQHPGKAPKLMIYEVSNRPSGVSNRFSGSKSGNTASLTISGLQAEDEADYYCSSYTSTSVVFGGGTKLTVL

SEQ ID NO: 3365 - protein, 448 aa, synthetic construct; identical to SEQ ID NO: 3059
  REGION 1..448: note = Description of Artificial Sequence: Synthetic polypeptide

SEQ ID NO: 3366 - protein, 215 aa, synthetic construct
  REGION 1..215: note = Description of Artificial Sequence: Synthetic polypeptide
QSALTQPASVSGSPGQSITISCTGTSSDVGGYNYVSWYQQHPGKAPKLMIYEVSNRPSGVSNRFSGSKSGNTASLTISGLQAEDEADYYCSSYTSTSVVFGGGTKLTVLGQPKAAPSVTLFPPSSEELQANKATLVCLISDFYPGAVTVAWKADSSPVKAGVETTTPSKQSNNKYAASSYLSLTPEQWKSHRSYSCQVTHEGSTVEKTVAPTECS

SEQ ID NO: 3367 - protein, 5 aa, synthetic construct
  REGION 1..5: note = Description of Artificial Sequence: Synthetic peptide
TYAIS

SEQ ID NO: 3368 - protein, 17 aa, synthetic construct
  REGION 1..17: note = Description of Artificial Sequence: Synthetic peptide
GIIPIFGTATYAQRFQD

SEQ ID NO: 3369 - protein, 14 aa, synthetic construct
  REGION 1..14: note = Description of Artificial Sequence: Synthetic peptide
GVGWGSDYYYGLDV

SEQ ID NO: 3370 - protein, 16 aa, synthetic construct
  REGION 1..16: note = Description of Artificial Sequence: Synthetic peptide
RSSQSLVHSDGNTYLS

SEQ ID NO: 3371 - protein, 7 aa, synthetic construct
  REGION 1..7: note = Description of Artificial Sequence: Synthetic peptide
KISNRFS

SEQ ID NO: 3372 - protein, 9 aa, synthetic construct
  REGION 1..9: note = Description of Artificial Sequence: Synthetic peptide
IQATHHPLT

SEQ ID NO: 3373 - protein, 7 aa, synthetic construct
  REGION 1..7: note = Description of Artificial Sequence: Synthetic peptide
GGTFSTY

SEQ ID NO: 3374 - protein, 6 aa, synthetic construct
  REGION 1..6: note = Description of Artificial Sequence: Synthetic peptide
IPIFGT

SEQ ID NO: 3375 - protein, 13 aa, synthetic construct
  REGION 1..13: note = Description of Artificial Sequence: Synthetic peptide
GVGWGSDYYYGLD

SEQ ID NO: 3376 - protein, 12 aa, synthetic construct
  REGION 1..12: note = Description of Artificial Sequence: Synthetic peptide
SQSLVHSDGNTY

SEQ ID NO: 3377 - skipped

SEQ ID NO: 3378 - protein, 6 aa, synthetic construct
  REGION 1..6: note = Description of Artificial Sequence: Synthetic peptide
ATHHPL

SEQ ID NO: 3379 - protein, 10 aa, synthetic construct
  REGION 1..10: note = Description of Artificial Sequence: Synthetic peptide
GGTFSTYAIS

SEQ ID NO: 3380 - protein, 10 aa, synthetic construct
  REGION 1..10: note = Description of Artificial Sequence: Synthetic peptide
GIIPIFGTAT

SEQ ID NO: 3381 - protein, 14 aa, synthetic construct
  REGION 1..14: note = Description of Artificial Sequence: Synthetic peptide
GVGWGSDYYYGLDV

SEQ ID NO: 3382 - protein, 16 aa, synthetic construct
  REGION 1..16: note = Description of Artificial Sequence: Synthetic peptide
RSSQSLVHSDGNTYLS

SEQ ID NO: 3383 - protein, 7 aa, synthetic construct
  REGION 1..7: note = Description of Artificial Sequence: Synthetic peptide
KISNRFS

SEQ ID NO: 3384 - protein, 9 aa, synthetic construct
  REGION 1..9: note = Description of Artificial Sequence: Synthetic peptide
IQATHHPLT

SEQ ID NO: 3385 - protein, 6 aa, synthetic construct
  REGION 1..6: note = Description of Artificial Sequence: Synthetic peptide
STYAIS

SEQ ID NO: 3386 - protein, 13 aa, synthetic construct
  REGION 1..13: note = Description of Artificial Sequence: Synthetic peptide
WMGGIIPIFGTAT

SEQ ID NO: 3387 - protein, 15 aa, synthetic construct
  REGION 1..15: note = Description of Artificial Sequence: Synthetic peptide
ARGVGWGSDYYYGLD

SEQ ID NO: 3388 - protein, 12 aa, synthetic construct
  REGION 1..12: note = Description of Artificial Sequence: Synthetic peptide
VHSDGNTYLSWL

SEQ ID NO: 3389 - protein, 10 aa, synthetic construct
  REGION 1..10: note = Description of Artificial Sequence: Synthetic peptide
LLIYKISNRF

SEQ ID NO: 3390 - protein, 8 aa, synthetic construct
  REGION 1..8: note = Description of Artificial Sequence: Synthetic peptide
IQATHHPL

SEQ ID NO: 3391 - protein, 8 aa, synthetic construct
  REGION 1..8: note = Description of Artificial Sequence: Synthetic peptide
GGTFSTYA

SEQ ID NO: 3392 - protein, 8 aa, synthetic construct
  REGION 1..8: note = Description of Artificial Sequence: Synthetic peptide
IIPIFGTA

SEQ ID NO: 3393 - protein, 16 aa, synthetic construct
  REGION 1..16: note = Description of Artificial Sequence: Synthetic peptide
ARGVGWGSDYYYGLDV

SEQ ID NO: 3394 - protein, 11 aa, synthetic construct
  REGION 1..11: note = Description of Artificial Sequence: Synthetic peptide
QSLVHSDGNTY

SEQ ID NO: 3395 - skipped

SEQ ID NO: 3396 - protein, 9 aa, synthetic construct
  REGION 1..9: note = Description of Artificial Sequence: Synthetic peptide
IQATHHPLT

SEQ ID NO: 3397 - protein, 123 aa, synthetic construct
  REGION 1..123: note = Description of Artificial Sequence: Synthetic polypeptide
EVQLVESGAEVKKPGSSVKVSCKASGGTFSTYAISWVRQAPGQGLEWMGGIIPIFGTATYAQRFQDRVMITADKSTTTAYMELSSLRSEDTAVFYCARGVGWGSDYYYGLDVWGQGTMVTVSS

SEQ ID NO: 3398 - protein, 112 aa, synthetic construct
  REGION 1..112: note = Description of Artificial Sequence: Synthetic polypeptide
EIVMTQSPLSSPVTLGQPASISCRSSQSLVHSDGNTYLSWLQQRPGQSPRLLIYKISNRFSGVPDRFSGSGAGTDFTLRITRVEPEDVGVYYCIQATHHPLTFGGGTRLEIK

SEQ ID NO: 3399 - protein, 453 aa, synthetic construct
  REGION 1..453: note = Description of Artificial Sequence: Synthetic polypeptide
EVQLVESGAEVKKPGSSVKVSCKASGGTFSTYAISWVRQAPGQGLEWMGGIIPIFGTATYAQRFQDRVMITADKSTTTAYMELSSLRSEDTAVFYCARGVGWGSDYYYGLDVWGQGTMVTVSSASTKGPSVFPLAPSSKSTSGGTAALGCLVKDYFPEPVTVSWNSGALTSGVHTFPAVLQSSGLYSLSSVVTVPSSSLGTQTYICNVNHKPSNTKVDKKVEPKSCDKTHTCPPCPAPELLGGPSVFLFPPKPKDTLMISRTPEVTCVVVDVSHEDPEVKFNWYVDGVEVHNAKTKPREEQYNSTYRVVSVLTVLHQDWLNGKEYKCKVSNKALPAPIEKTISKAKGQPREPQVYTLPPSREEMTKNQVSLTCLVKGFYPSDIAVEWESNGQPENNYKTTPPVLDSDGSFFLYSKLTVDKSRWQQGNVFSCSVMHEALHNHYTQKSLSLSPGK

SEQ ID NO: 3400 - protein, 219 aa, synthetic construct
  REGION 1..219: note = Description of Artificial Sequence: Synthetic polypeptide
EIVMTQSPLSSPVTLGQPASISCRSSQSLVHSDGNTYLSWLQQRPGQSPRLLIYKISNRFSGVPDRFSGSGAGTDFTLRITRVEPEDVGVYYCIQATHHPLTFGGGTRLEIKRTVAAPSVFIFPPSDEQLKSGTASVVCLLNNFYPREAKVQWKVDNALQSGNSQESVTEQDSKDSTYSLSSTLTLSKADYEKHKVYACEVTHQGLSSPVTKSFNRGEC

SEQ ID NO: 3401 - protein, 5 aa, synthetic construct
  REGION 1..5: note = Description of Artificial Sequence: Synthetic peptide
NYYWS

SEQ ID NO: 3402 - protein, 16 aa, synthetic construct
  REGION 1..16: note = Description of Artificial Sequence: Synthetic peptide
RIYSSGITNYNPSLKS

SEQ ID NO: 3403 - protein, 10 aa, synthetic construct
  REGION 1..10: note = Description of Artificial Sequence: Synthetic peptide
IVGVKGAFAI

SEQ ID NO: 3404 - protein, 14 aa, synthetic construct
  REGION 1..14: note = Description of Artificial Sequence: Synthetic peptide
TGTSSDVGGYNYVS

SEQ ID NO: 3405 - protein, 7 aa, synthetic construct
  REGION 1..7: note = Description of Artificial Sequence: Synthetic peptide
EVSNRPS

SEQ ID NO: 3406 - protein, 9 aa, synthetic construct
  REGION 1..9: note = Description of Artificial Sequence: Synthetic peptide
SSYTSTSVV

SEQ ID NO: 3407 - protein, 7 aa, synthetic construct
  REGION 1..7: note = Description of Artificial Sequence: Synthetic peptide
GGSISNY

SEQ ID NO: 3408 - protein, 5 aa, synthetic construct
  REGION 1..5: note = Description of Artificial Sequence: Synthetic peptide
YSSGI

SEQ ID NO: 3409 - protein, 9 aa, synthetic construct
  REGION 1..9: note = Description of Artificial Sequence: Synthetic peptide
IVGVKGAFA

SEQ ID NO: 3410 - protein, 10 aa, synthetic construct
  REGION 1..10: note = Description of Artificial Sequence: Synthetic peptide
TSSDVGGYNY

SEQ ID NO: 3411 - skipped

SEQ ID NO: 3412 - protein, 6 aa, synthetic construct
  REGION 1..6: note = Description of Artificial Sequence: Synthetic peptide
YTSTSV

SEQ ID NO: 3413 - protein, 10 aa, synthetic construct
  REGION 1..10: note = Description of Artificial Sequence: Synthetic peptide
GGSISNYYWS

SEQ ID NO: 3414 - protein, 9 aa, synthetic construct
  REGION 1..9: note = Description of Artificial Sequence: Synthetic peptide
RIYSSGITN

SEQ ID NO: 3415 - protein, 10 aa, synthetic construct
  REGION 1..10: note = Description of Artificial Sequence: Synthetic peptide
IVGVKGAFAI

SEQ ID NO: 3416 - protein, 14 aa, synthetic construct
  REGION 1..14: note = Description of Artificial Sequence: Synthetic peptide
TGTSSDVGGYNYVS

SEQ ID NO: 3417 - protein, 7 aa, synthetic construct
  REGION 1..7: note = Description of Artificial Sequence: Synthetic peptide
EVSNRPS

SEQ ID NO: 3418 - protein, 9 aa, synthetic construct
  REGION 1..9: note = Description of Artificial Sequence: Synthetic peptide
SSYTSTSVV

SEQ ID NO: 3419 - protein, 6 aa, synthetic construct
  REGION 1..6: note = Description of Artificial Sequence: Synthetic peptide
SNYYWS

SEQ ID NO: 3420 - protein, 12 aa, synthetic construct
  REGION 1..12: note = Description of Artificial Sequence: Synthetic peptide
WIGRIYSSGITN

SEQ ID NO: 3421 - protein, 11 aa, synthetic construct
  REGION 1..11: note = Description of Artificial Sequence: Synthetic peptide
AGIVGVKGAFA

SEQ ID NO: 3422 - protein, 10 aa, synthetic construct
  REGION 1..10: note = Description of Artificial Sequence: Synthetic peptide
VGGYNYVSWY

SEQ ID NO: 3423 - protein, 10 aa, synthetic construct
  REGION 1..10: note = Description of Artificial Sequence: Synthetic peptide
LMIYEVSNRP

SEQ ID NO: 3424 - protein, 8 aa, synthetic construct
  REGION 1..8: note = Description of Artificial Sequence: Synthetic peptide
SSYTSTSV

SEQ ID NO: 3425 - protein, 8 aa, synthetic construct
  REGION 1..8: note = Description of Artificial Sequence: Synthetic peptide
GGSISNYY

SEQ ID NO: 3426 - protein, 7 aa, synthetic construct
  REGION 1..7: note = Description of Artificial Sequence: Synthetic peptide
IYSSGIT

SEQ ID NO: 3427 - protein, 12 aa, synthetic construct
  REGION 1..12: note = Description of Artificial Sequence: Synthetic peptide
AGIVGVKGAFAI

SEQ ID NO: 3428 - protein, 9 aa, synthetic construct
  REGION 1..9: note = Description of Artificial Sequence: Synthetic peptide
SSDVGGYNY

SEQ ID NO: 3429 - skipped

SEQ ID NO: 3430 - protein, 9 aa, synthetic construct
  REGION 1..9: note = Description of Artificial Sequence: Synthetic peptide
SSYTSTSVV

SEQ ID NO: 3431 - protein, 118 aa, synthetic construct; identical to SEQ ID NO: 3329
  REGION 1..118: note = Description of Artificial Sequence: Synthetic polypeptide

SEQ ID NO: 3432 - protein, 109 aa, synthetic construct
  REGION 1..109: note = Description of Artificial Sequence: Synthetic polypeptide
QAVLTQPASVSGSPGQSITISCTGTSSDVGGYNYVSWYQQHPGKAPKLMIYEVSNRPSGVSNRFSGSKSGNTASLTISGLQAEDEADYYCSSYTSTSVVFGGGTKVTVL

SEQ ID NO: 3433 - protein, 448 aa, synthetic construct; identical to SEQ ID NO: 3331
  REGION 1..448: note = Description of Artificial Sequence: Synthetic polypeptide

SEQ ID NO: 3434 - protein, 215 aa, synthetic construct
  REGION 1..215: note = Description of Artificial Sequence: Synthetic polypeptide
QAVLTQPASVSGSPGQSITISCTGTSSDVGGYNYVSWYQQHPGKAPKLMIYEVSNRPSGVSNRFSGSKSGNTASLTISGLQAEDEADYYCSSYTSTSVVFGGGTKVTVLGQPKAAPSVTLFPPSSEELQANKATLVCLISDFYPGAVTVAWKADSSPVKAGVETTTPSKQSNNKYAASSYLSLTPEQWKSHRSYSCQVTHEGSTVEKTVAPTECS

SEQ ID NO: 3435 - protein, 5 aa, synthetic construct
  REGION 1..5: note = Description of Artificial Sequence: Synthetic peptide
SFYWS

SEQ ID NO: 3436 - protein, 16 aa, synthetic construct
  REGION 1..16: note = Description of Artificial Sequence: Synthetic peptide
RIYTSGGTIYNPSLKS

SEQ ID NO: 3437 - protein, 7 aa, synthetic construct
  REGION 1..7: note = Description of Artificial Sequence: Synthetic peptide
WLRAFDY

SEQ ID NO: 3438 - protein, 11 aa, synthetic construct
  REGION 1..11: note = Description of Artificial Sequence: Synthetic peptide
SGDKLGDKYAC

SEQ ID NO: 3439 - protein, 7 aa, synthetic construct
  REGION 1..7: note = Description of Artificial Sequence: Synthetic peptide
QDSKRPS

SEQ ID NO: 3440 - protein, 9 aa, synthetic construct
  REGION 1..9: note = Description of Artificial Sequence: Synthetic peptide
QAWDSSTVV

SEQ ID NO: 3441 - protein, 7 aa, synthetic construct
  REGION 1..7: note = Description of Artificial Sequence: Synthetic peptide
YGSFSSF

SEQ ID NO: 3442 - protein, 5 aa, synthetic construct
  REGION 1..5: note = Description of Artificial Sequence: Synthetic peptide
YTSGG

SEQ ID NO: 3443 - protein, 6 aa, synthetic construct
  REGION 1..6: note = Description of Artificial Sequence: Synthetic peptide
WLRAFD

SEQ ID NO: 3444 - protein, 7 aa, synthetic construct
  REGION 1..7: note = Description of Artificial Sequence: Synthetic peptide
DKLGDKY

SEQ ID NO: 3445 - skipped

SEQ ID NO: 3446 - protein, 6 aa, synthetic construct
  REGION 1..6: note = Description of Artificial Sequence: Synthetic peptide
WDSSTV

SEQ ID NO: 3447 - protein, 10 aa, synthetic construct
  REGION 1..10: note = Description of Artificial Sequence: Synthetic peptide
YGSFSSFYWS

SEQ ID NO: 3448 - protein, 9 aa, synthetic construct
  REGION 1..9: note = Description of Artificial Sequence: Synthetic peptide
RIYTSGGTI

SEQ ID NO: 3449 - protein, 7 aa, synthetic construct
  REGION 1..7: note = Description of Artificial Sequence: Synthetic peptide
WLRAFDY

SEQ ID NO: 3450 - protein, 11 aa, synthetic construct
  REGION 1..11: note = Description of Artificial Sequence: Synthetic peptide
SGDKLGDKYAC

SEQ ID NO: 3451 - protein, 7 aa, synthetic construct
  REGION 1..7: note = Description of Artificial Sequence: Synthetic peptide
QDSKRPS

SEQ ID NO: 3452 - protein, 9 aa, synthetic construct
  REGION 1..9: note = Description of Artificial Sequence: Synthetic peptide
QAWDSSTVV

SEQ ID NO: 3453 - protein, 6 aa, synthetic construct
  REGION 1..6: note = Description of Artificial Sequence: Synthetic peptide
SSFYWS

SEQ ID NO: 3454 - protein, 12 aa, synthetic construct
  REGION 1..12: note = Description of Artificial Sequence: Synthetic peptide
WIGRIYTSGGTI

SEQ ID NO: 3455 - protein, 8 aa, synthetic construct
  REGION 1..8: note = Description of Artificial Sequence: Synthetic peptide
ARWLRAFD

SEQ ID NO: 3456 - protein, 7 aa, synthetic construct
  REGION 1..7: note = Description of Artificial Sequence: Synthetic peptide
DKYACWY

SEQ ID NO: 3457 - protein, 10 aa, synthetic construct
  REGION 1..10: note = Description of Artificial Sequence: Synthetic peptide
LVIYQDSKRP

SEQ ID NO: 3458 - protein, 8 aa, synthetic construct
  REGION 1..8: note = Description of Artificial Sequence: Synthetic peptide
QAWDSSTV

SEQ ID NO: 3459 - protein, 8 aa, synthetic construct
  REGION 1..8: note = Description of Artificial Sequence: Synthetic peptide
YGSFSSFY

SEQ ID NO: 3460 - protein, 7 aa, synthetic construct
  REGION 1..7: note = Description of Artificial Sequence: Synthetic peptide
IYTSGGT

SEQ ID NO: 3461 - protein, 9 aa, synthetic construct
  REGION 1..9: note = Description of Artificial Sequence: Synthetic peptide
ARWLRAFDY

SEQ ID NO: 3462 - protein, 6 aa, synthetic construct
  REGION 1..6: note = Description of Artificial Sequence: Synthetic peptide
KLGDKY

SEQ ID NO: 3463 - skipped

SEQ ID NO: 3464 - protein, 9 aa, synthetic construct
  REGION 1..9: note = Description of Artificial Sequence: Synthetic peptide
QAWDSSTVV

SEQ ID NO: 3465 - protein, 115 aa, synthetic construct
  REGION 1..115: note = Description of Artificial Sequence: Synthetic polypeptide
QVQLQESGPGLVKPSETLSLTCTVSYGSFSSFYWSWIRQPAGKGLEWIGRIYTSGGTIYNPSLKSRVTMSVDTSKNQFSLKLSSVTAADTAVYYCARWLRAFDYWGQGTLVTVSS

SEQ ID NO: 3466 - protein, 106 aa, synthetic construct; identical to SEQ ID NO: 2378
  REGION 1..106: note = Description of Artificial Sequence: Synthetic polypeptide

SEQ ID NO: 3467 - protein, 445 aa, synthetic construct
  REGION 1..445: note = Description of Artificial Sequence: Synthetic polypeptide
QVQLQESGPGLVKPSETLSLTCTVSYGSFSSFYWSWIRQPAGKGLEWIGRIYTSGGTIYNPSLKSRVTMSVDTSKNQFSLKLSSVTAADTAVYYCARWLRAFDYWGQGTLVTVSSASTKGPSVFPLAPSSKSTSGGTAALGCLVKDYFPEPVTVSWNSGALTSGVHTFPAVLQSSGLYSLSSVVTVPSSSLGTQTYICNVNHKPSNTKVDKKVEPKSCDKTHTCPPCPAPELLGGPSVFLFPPKPKDTLMISRTPEVTCVVVDVSHEDPEVKFNWYVDGVEVHNAKTKPREEQYNSTYRVVSVLTVLHQDWLNGKEYKCKVSNKALPAPIEKTISKAKGQPREPQVYTLPPSREEMTKNQVSLTCLVKGFYPSDIAVEWESNGQPENNYKTTPPVLDSDGSFFLYSKLTVDKSRWQQGNVFSCSVMHEALHNHYTQKSLSLSPGK

SEQ ID NO: 3468 - protein, 212 aa, synthetic construct; identical to SEQ ID NO: 2380
  REGION 1..212: note = Description of Artificial Sequence: Synthetic polypeptide

SEQ ID NO: 3469 - protein, 5 aa, synthetic construct
  REGION 1..5: note = Description of Artificial Sequence: Synthetic peptide
NYYWS

SEQ ID NO: 3470 - protein, 16 aa, synthetic construct
  REGION 1..16: note = Description of Artificial Sequence: Synthetic peptide
RIYSSGITNYNPSLKS

SEQ ID NO: 3471 - protein, 10 aa, synthetic construct
  REGION 1..10: note = Description of Artificial Sequence: Synthetic peptide
IVGVKGAFAI

SEQ ID NO: 3472 - protein, 14 aa, synthetic construct
  REGION 1..14: note = Description of Artificial Sequence: Synthetic peptide
TGTSSDVGGYNYVS

SEQ ID NO: 3473 - protein, 7 aa, synthetic construct
  REGION 1..7: note = Description of Artificial Sequence: Synthetic peptide
EVSNRPS

SEQ ID NO: 3474 - protein, 9 aa, synthetic construct
  REGION 1..9: note = Description of Artificial Sequence: Synthetic peptide
SSYTSTSVV

SEQ ID NO: 3475 - protein, 7 aa, synthetic construct
  REGION 1..7: note = Description of Artificial Sequence: Synthetic peptide
GGSISNY

SEQ ID NO: 3476 - protein, 5 aa, synthetic construct
  REGION 1..5: note = Description of Artificial Sequence: Synthetic peptide
YSSGI

SEQ ID NO: 3477 - protein, 9 aa, synthetic construct
  REGION 1..9: note = Description of Artificial Sequence: Synthetic peptide
IVGVKGAFA

SEQ ID NO: 3478 - protein, 10 aa, synthetic construct
  REGION 1..10: note = Description of Artificial Sequence: Synthetic peptide
TSSDVGGYNY

SEQ ID NO: 3479 - skipped

SEQ ID NO: 3480 - protein, 6 aa, synthetic construct
  REGION 1..6: note = Description of Artificial Sequence: Synthetic peptide
YTSTSV

SEQ ID NO: 3481 - protein, 10 aa, synthetic construct
  REGION 1..10: note = Description of Artificial Sequence: Synthetic peptide
GGSISNYYWS

SEQ ID NO: 3482 - protein, 9 aa, synthetic construct
  REGION 1..9: note = Description of Artificial Sequence: Synthetic peptide
RIYSSGITN

SEQ ID NO: 3483 - protein, 10 aa, synthetic construct
  REGION 1..10: note = Description of Artificial Sequence: Synthetic peptide
IVGVKGAFAI

SEQ ID NO: 3484 - protein, 14 aa, synthetic construct
  REGION 1..14: note = Description of Artificial Sequence: Synthetic peptide
TGTSSDVGGYNYVS

SEQ ID NO: 3485 - protein, 7 aa, synthetic construct
  REGION 1..7: note = Description of Artificial Sequence: Synthetic peptide
EVSNRPS

SEQ ID NO: 3486 - protein, 9 aa, synthetic construct
  REGION 1..9: note = Description of Artificial Sequence: Synthetic peptide
SSYTSTSVV

SEQ ID NO: 3487 - protein, 6 aa, synthetic construct
  REGION 1..6: note = Description of Artificial Sequence: Synthetic peptide
SNYYWS

SEQ ID NO: 3488 - protein, 12 aa, synthetic construct
  REGION 1..12: note = Description of Artificial Sequence: Synthetic peptide
WIGRIYSSGITN

SEQ ID NO: 3489 - protein, 11 aa, synthetic construct
  REGION 1..11: note = Description of Artificial Sequence: Synthetic peptide
AGIVGVKGAFA

SEQ ID NO: 3490 - protein, 10 aa, synthetic construct
  REGION 1..10: note = Description of Artificial Sequence: Synthetic peptide
VGGYNYVSWY

SEQ ID NO: 3491 - protein, 10 aa, synthetic construct
  REGION 1..10: note = Description of Artificial Sequence: Synthetic peptide
LMIYEVSNRP

SEQ ID NO: 3492 - protein, 8 aa, synthetic construct
  REGION 1..8: note = Description of Artificial Sequence: Synthetic peptide
SSYTSTSV

SEQ ID NO: 3493 - protein, 8 aa, synthetic construct
  REGION 1..8: note = Description of Artificial Sequence: Synthetic peptide
GGSISNYY

SEQ ID NO: 3494 - protein, 7 aa, synthetic construct
  REGION 1..7: note = Description of Artificial Sequence: Synthetic peptide
IYSSGIT

SEQ ID NO: 3495 - protein, 12 aa, synthetic construct
  REGION 1..12: note = Description of Artificial Sequence: Synthetic peptide
AGIVGVKGAFAI

SEQ ID NO: 3496 - protein, 9 aa, synthetic construct
  REGION 1..9: note = Description of Artificial Sequence: Synthetic peptide
SSDVGGYNY

SEQ ID NO: 3497 - skipped

SEQ ID NO: 3498 - protein, 9 aa, synthetic construct
  REGION 1..9: note = Description of Artificial Sequence: Synthetic peptide
SSYTSTSVV

SEQ ID NO: 3499 - protein, 118 aa, synthetic construct; identical to SEQ ID NO: 3329
  REGION 1..118: note = Description of Artificial Sequence: Synthetic polypeptide

SEQ ID NO: 3500 - protein, 109 aa, synthetic construct
  REGION 1..109: note = Description of Artificial Sequence: Synthetic polypeptide
QPVLTQPASVSGSPGQSITISCTGTSSDVGGYNYVSWYQQHPGKAPKLMIYEVSNRPSGVSNRFSGSKSGNTASLTISGLQAEDEADYYCSSYTSTSVVFGGGTKLTVL

SEQ ID NO: 3501 - protein, 448 aa, synthetic construct; identical to SEQ ID NO: 3331
  REGION 1..448: note = Description of Artificial Sequence: Synthetic polypeptide

SEQ ID NO: 3502 - protein, 215 aa, synthetic construct
  REGION 1..215: note = Description of Artificial Sequence: Synthetic polypeptide
QPVLTQPASVSGSPGQSITISCTGTSSDVGGYNYVSWYQQHPGKAPKLMIYEVSNRPSGVSNRFSGSKSGNTASLTISGLQAEDEADYYCSSYTSTSVVFGGGTKLTVLGQPKAAPSVTLFPPSSEELQANKATLVCLISDFYPGAVTVAWKADSSPVKAGVETTTPSKQSNNKYAASSYLSLTPEQWKSHRSYSCQVTHEGSTVEKTVAPTECS

SEQ ID NO: 3503 - protein, 5 aa, synthetic construct
  REGION 1..5: note = Description of Artificial Sequence: Synthetic peptide
NHGMS

SEQ ID NO: 3504 - protein, 17 aa, synthetic construct
  REGION 1..17: note = Description of Artificial Sequence: Synthetic peptide
SITRGGDTTYYPDNVKG

SEQ ID NO: 3505 - protein, 11 aa, synthetic construct
  REGION 1..11: note = Description of Artificial Sequence: Synthetic peptide
GPLTVGYAMDY

SEQ ID NO: 3506 - protein, 11 aa, synthetic construct
  REGION 1..11: note = Description of Artificial Sequence: Synthetic peptide
QGDSLRSYYAT

SEQ ID NO: 3507 - protein, 7 aa, synthetic construct
  REGION 1..7: note = Description of Artificial Sequence: Synthetic peptide
GENNRPS

SEQ ID NO: 3508 - protein, 11 aa, synthetic construct
  REGION 1..11: note = Description of Artificial Sequence: Synthetic peptide
NSRDTGDHHLV

SEQ ID NO: 3509 - protein, 7 aa, synthetic construct
  REGION 1..7: note = Description of Artificial Sequence: Synthetic peptide
GFTFSNH

SEQ ID NO: 3510 - protein, 6 aa, synthetic construct
  REGION 1..6: note = Description of Artificial Sequence: Synthetic peptide
TRGGDT

SEQ ID NO: 3511 - protein, 10 aa, synthetic construct
  REGION 1..10: note = Description of Artificial Sequence: Synthetic peptide
GPLTVGYAMD

SEQ ID NO: 3512 - protein, 7 aa, synthetic construct
  REGION 1..7: note = Description of Artificial Sequence: Synthetic peptide
DSLRSYY

SEQ ID NO: 3513 - skipped

SEQ ID NO: 3514 - protein, 8 aa, synthetic construct
  REGION 1..8: note = Description of Artificial Sequence: Synthetic peptide
RDTGDHHL

SEQ ID NO: 3515 - protein, 10 aa, synthetic construct
  REGION 1..10: note = Description of Artificial Sequence: Synthetic peptide
GFTFSNHGMS

SEQ ID NO: 3516 - protein, 10 aa, synthetic construct
  REGION 1..10: note = Description of Artificial Sequence: Synthetic peptide
SITRGGDTTY

SEQ ID NO: 3517 - protein, 11 aa, synthetic construct
  REGION 1..11: note = Description of Artificial Sequence: Synthetic peptide
GPLTVGYAMDY

SEQ ID NO: 3518 - protein, 11 aa, synthetic construct
  REGION 1..11: note = Description of Artificial Sequence: Synthetic peptide
QGDSLRSYYAT

SEQ ID NO: 3519 - protein, 7 aa, synthetic construct
  REGION 1..7: note = Description of Artificial Sequence: Synthetic peptide
GENNRPS

SEQ ID NO: 3520 - protein, 11 aa, synthetic construct
  REGION 1..11: note = Description of Artificial Sequence: Synthetic peptide
NSRDTGDHHLV

SEQ ID NO: 3521 - protein, 6 aa, synthetic construct
  REGION 1..6: note = Description of Artificial Sequence: Synthetic peptide
SNHGMS

SEQ ID NO: 3522 - protein, 13 aa, synthetic construct
  REGION 1..13: note = Description of Artificial Sequence: Synthetic peptide
WVASITRGGDTTY

SEQ ID NO: 3523 - protein, 12 aa, synthetic construct
  REGION 1..12: note = Description of Artificial Sequence: Synthetic peptide
TRGPLTVGYAMD

SEQ ID NO: 3524 - protein, 7 aa, synthetic construct
  REGION 1..7: note = Description of Artificial Sequence: Synthetic peptide
SYYATWY

SEQ ID NO: 3525 - protein, 10 aa, synthetic construct
  REGION 1..10: note = Description of Artificial Sequence: Synthetic peptide
LVIYGENNRP

SEQ ID NO: 3526 - protein, 10 aa, synthetic construct
  REGION 1..10: note = Description of Artificial Sequence: Synthetic peptide
NSRDTGDHHL

SEQ ID NO: 3527 - protein, 8 aa, synthetic construct
  REGION 1..8: note = Description of Artificial Sequence: Synthetic peptide
GFTFSNHG

SEQ ID NO: 3528 - protein, 8 aa, synthetic construct
  REGION 1..8: note = Description of Artificial Sequence: Synthetic peptide
ITRGGDTT

SEQ ID NO: 3529 - protein, 13 aa, synthetic construct
  REGION 1..13: note = Description of Artificial Sequence: Synthetic peptide
TRGPLTVGYAMDY

SEQ ID NO: 3530 - protein, 6 aa, synthetic construct
  REGION 1..6: note = Description of Artificial Sequence: Synthetic peptide
SLRSYY

SEQ ID NO: 3531 - skipped

SEQ ID NO: 3532 - protein, 11 aa, synthetic construct
  REGION 1..11: note = Description of Artificial Sequence: Synthetic peptide
NSRDTGDHHLV

SEQ ID NO: 3533 - protein, 120 aa, synthetic construct
  REGION 1..120: note = Description of Artificial Sequence: Synthetic polypeptide
EVQLLESGGGLVKPGASLKLSCAASGFTFSNHGMSWVRQTSDKRLEWVASITRGGDTTYYPDNVKGRFTISRENAKNTLYLQMSSLKSDDTALYYCTRGPLTVGYAMDYWGQGTTVTVSS

SEQ ID NO: 3534 - protein, 108 aa, synthetic construct; identical to SEQ ID NO: 2854
  REGION 1..108: note = Description of Artificial Sequence: Synthetic polypeptide

SEQ ID NO: 3535 - protein, 450 aa, synthetic construct
  REGION 1..450: note = Description of Artificial Sequence: Synthetic polypeptide
EVQLLESGGGLVKPGASLKLSCAASGFTFSNHGMSWVRQTSDKRLEWVASITRGGDTTYYPDNVKGRFTISRENAKNTLYLQMSSLKSDDTALYYCTRGPLTVGYAMDYWGQGTTVTVSSASTKGPSVFPLAPSSKSTSGGTAALGCLVKDYFPEPVTVSWNSGALTSGVHTFPAVLQSSGLYSLSSVVTVPSSSLGTQTYICNVNHKPSNTKVDKKVEPKSCDKTHTCPPCPAPELLGGPSVFLFPPKPKDTLMISRTPEVTCVVVDVSHEDPEVKFNWYVDGVEVHNAKTKPREEQYNSTYRVVSVLTVLHQDWLNGKEYKCKVSNKALPAPIEKTISKAKGQPREPQVYTLPPSREEMTKNQVSLTCLVKGFYPSDIAVEWESNGQPENNYKTTPPVLDSDGSFFLYSKLTVDKSRWQQGNVFSCSVMHEALHNHYTQKSLSLSPGK

SEQ ID NO: 3536 - protein, 214 aa, synthetic construct; identical to SEQ ID NO: 2856
  REGION 1..214: note = Description of Artificial Sequence: Synthetic polypeptide

SEQ ID NO: 3537 - protein, 5 aa, synthetic construct
  REGION 1..5: note = Description of Artificial Sequence: Synthetic peptide
NYYWS

SEQ ID NO: 3538 - protein, 16 aa, synthetic construct
  REGION 1..16: note = Description of Artificial Sequence: Synthetic peptide
RIYSSGITNYNPSLKS

SEQ ID NO: 3539 - protein, 10 aa, synthetic construct
  REGION 1..10: note = Description of Artificial Sequence: Synthetic peptide
IVGVKGAFAI

SEQ ID NO: 3540 - protein, 14 aa, synthetic construct
  REGION 1..14: note = Description of Artificial Sequence: Synthetic peptide
TGTSSDVGGYNYVS

SEQ ID NO: 3541 - protein, 7 aa, synthetic construct
  REGION 1..7: note = Description of Artificial Sequence: Synthetic peptide
EVSNRPS

SEQ ID NO: 3542 - protein, 9 aa, synthetic construct
  REGION 1..9: note = Description of Artificial Sequence: Synthetic peptide
SSYTSTSVV

SEQ ID NO: 3543 - protein, 7 aa, synthetic construct
  REGION 1..7: note = Description of Artificial Sequence: Synthetic peptide
GGSISNY

SEQ ID NO: 3544 - protein, 5 aa, synthetic construct
  REGION 1..5: note = Description of Artificial Sequence: Synthetic peptide
YSSGI

SEQ ID NO: 3545 - protein, 9 aa, synthetic construct
  REGION 1..9: note = Description of Artificial Sequence: Synthetic peptide
IVGVKGAFA

SEQ ID NO: 3546 - protein, 10 aa, synthetic construct
  REGION 1..10: note = Description of Artificial Sequence: Synthetic peptide
TSSDVGGYNY

SEQ ID NO: 3547 - skipped

SEQ ID NO: 3548 - protein, 6 aa, synthetic construct
  REGION 1..6: note = Description of Artificial Sequence: Synthetic peptide
YTSTSV

SEQ ID NO: 3549 - protein, 10 aa, synthetic construct
  REGION 1..10: note = Description of Artificial Sequence: Synthetic peptide
GGSISNYYWS

SEQ ID NO: 3550 - protein, 9 aa, synthetic construct
  REGION 1..9: note = Description of Artificial Sequence: Synthetic peptide
RIYSSGITN

SEQ ID NO: 3551 - protein, 10 aa, synthetic construct
  REGION 1..10: note = Description of Artificial Sequence: Synthetic peptide
IVGVKGAFAI

SEQ ID NO: 3552 - protein, 14 aa, synthetic construct
  REGION 1..14: note = Description of Artificial Sequence: Synthetic peptide
TGTSSDVGGYNYVS

SEQ ID NO: 3553 - protein, 7 aa, synthetic construct
  REGION 1..7: note = Description of Artificial Sequence: Synthetic peptide
EVSNRPS

SEQ ID NO: 3554 - protein, 9 aa, synthetic construct
  REGION 1..9: note = Description of Artificial Sequence: Synthetic peptide
SSYTSTSVV

SEQ ID NO: 3555 - protein, 6 aa, synthetic construct
  REGION 1..6: note = Description of Artificial Sequence: Synthetic peptide
SNYYWS

SEQ ID NO: 3556 - protein, 12 aa, synthetic construct
  REGION 1..12: note = Description of Artificial Sequence: Synthetic peptide
WIGRIYSSGITN

SEQ ID NO: 3557 - protein, 11 aa, synthetic construct
  REGION 1..11: note = Description of Artificial Sequence: Synthetic peptide
AGIVGVKGAFA

SEQ ID NO: 3558 - protein, 10 aa, synthetic construct
  REGION 1..10: note = Description of Artificial Sequence: Synthetic peptide
VGGYNYVSWY

SEQ ID NO: 3559 - protein, 10 aa, synthetic construct
  REGION 1..10: note = Description of Artificial Sequence: Synthetic peptide
LMIYEVSNRP

SEQ ID NO: 3560 - protein, 8 aa, synthetic construct
  REGION 1..8: note = Description of Artificial Sequence: Synthetic peptide
SSYTSTSV

SEQ ID NO: 3561 - protein, 8 aa, synthetic construct
  REGION 1..8: note = Description of Artificial Sequence: Synthetic peptide
GGSISNYY

SEQ ID NO: 3562 - protein, 7 aa, synthetic construct
  REGION 1..7: note = Description of Artificial Sequence: Synthetic peptide
IYSSGIT

SEQ ID NO: 3563 - protein, 12 aa, synthetic construct
  REGION 1..12: note = Description of Artificial Sequence: Synthetic peptide
AGIVGVKGAFAI

SEQ ID NO: 3564 - protein, 9 aa, synthetic construct
  REGION 1..9: note = Description of Artificial Sequence: Synthetic peptide
SSDVGGYNY

SEQ ID NO: 3565 - skipped

SEQ ID NO: 3566 - protein, 9 aa, synthetic construct
  REGION 1..9: note = Description of Artificial Sequence: Synthetic peptide
SSYTSTSVV

SEQ ID NO: 3567 - protein, 118 aa, synthetic construct; identical to SEQ ID NO: 3057
  REGION 1..118: note = Description of Artificial Sequence: Synthetic polypeptide

SEQ ID NO: 3568 - protein, 109 aa, synthetic construct
  REGION 1..109: note = Description of Artificial Sequence: Synthetic polypeptide
QSALTQPASVSGSPGQSITISCTGTSSDVGGYNYVSWYQQHPGKAPKLMIYEVSNRPSGVSNRFSGSKSGNTASLTISGLQAEDEADYYCSSYTSTSVVFGGGTKVTVL

SEQ ID NO: 3569 - protein, 448 aa, synthetic construct; identical to SEQ ID NO: 3059
  REGION 1..448: note = Description of Artificial Sequence: Synthetic polypeptide

SEQ ID NO: 3570 - protein, 215 aa, synthetic construct
  REGION 1..215: note = Description of Artificial Sequence: Synthetic polypeptide
QSALTQPASVSGSPGQSITISCTGTSSDVGGYNYVSWYQQHPGKAPKLMIYEVSNRPSGVSNRFSGSKSGNTASLTISGLQAEDEADYYCSSYTSTSVVFGGGTKVTVLGQPKAAPSVTLFPPSSEELQANKATLVCLISDFYPGAVTVAWKADSSPVKAGVETTTPSKQSNNKYAASSYLSLTPEQWKSHRSYSCQVTHEGSTVEKTVAPTECS

SEQ ID NO: 3571 - protein, 5 aa, synthetic construct
  REGION 1..5: note = Description of Artificial Sequence: Synthetic peptide
NYYWS

SEQ ID NO: 3572 - protein, 16 aa, synthetic construct
  REGION 1..16: note = Description of Artificial Sequence: Synthetic peptide
RIYSSGITNYNPSLKS

SEQ ID NO: 3573 - protein, 10 aa, synthetic construct
  REGION 1..10: note = Description of Artificial Sequence: Synthetic peptide
IVGVKGAFAI

SEQ ID NO: 3574 - protein, 14 aa, synthetic construct
  REGION 1..14: note = Description of Artificial Sequence: Synthetic peptide
TGTSSDVGGYNYVS

SEQ ID NO: 3575 - protein, 7 aa, synthetic construct
  REGION 1..7: note = Description of Artificial Sequence: Synthetic peptide
EVSNRPS

SEQ ID NO: 3576 - protein, 9 aa, synthetic construct
  REGION 1..9: note = Description of Artificial Sequence: Synthetic peptide
SSYTSTSVV

SEQ ID NO: 3577 - protein, 7 aa, synthetic construct
  REGION 1..7: note = Description of Artificial Sequence: Synthetic peptide
GGSISNY

SEQ ID NO: 3578 - protein, 5 aa, synthetic construct
  REGION 1..5: note = Description of Artificial Sequence: Synthetic peptide
YSSGI

SEQ ID NO: 3579 - protein, 9 aa, synthetic construct
  REGION 1..9: note = Description of Artificial Sequence: Synthetic peptide
IVGVKGAFA

SEQ ID NO: 3580 - protein, 10 aa, synthetic construct
  REGION 1..10: note = Description of Artificial Sequence: Synthetic peptide
TSSDVGGYNY

SEQ ID NO: 3581 - skipped

SEQ ID NO: 3582 - protein, 6 aa, synthetic construct
  REGION 1..6: note = Description of Artificial Sequence: Synthetic peptide
YTSTSV

SEQ ID NO: 3583 - protein, 10 aa, synthetic construct
  REGION 1..10: note = Description of Artificial Sequence: Synthetic peptide
GGSISNYYWS

SEQ ID NO: 3584 - protein, 9 aa, synthetic construct
  REGION 1..9: note = Description of Artificial Sequence: Synthetic peptide
RIYSSGITN

SEQ ID NO: 3585 - protein, 10 aa, synthetic construct
  REGION 1..10: note = Description of Artificial Sequence: Synthetic peptide
IVGVKGAFAI

SEQ ID NO: 3586 - protein, 14 aa, synthetic construct
  REGION 1..14: note = Description of Artificial Sequence: Synthetic peptide
TGTSSDVGGYNYVS

SEQ ID NO: 3587 - protein, 7 aa, synthetic construct
  REGION 1..7: note = Description of Artificial Sequence: Synthetic peptide
EVSNRPS

SEQ ID NO: 3588 - protein, 9 aa, synthetic construct
  REGION 1..9: note = Description of Artificial Sequence: Synthetic peptide
SSYTSTSVV

SEQ ID NO: 3589 - protein, 6 aa, synthetic construct
  REGION 1..6: note = Description of Artificial Sequence: Synthetic peptide
SNYYWS

SEQ ID NO: 3590 - protein, 12 aa, synthetic construct
  REGION 1..12: note = Description of Artificial Sequence: Synthetic peptide
WIGRIYSSGITN

SEQ ID NO: 3591 - protein, 11 aa, synthetic construct
  REGION 1..11: note = Description of Artificial Sequence: Synthetic peptide
AGIVGVKGAFA

SEQ ID NO: 3592 - protein, 10 aa, synthetic construct
  REGION 1..10: note = Description of Artificial Sequence: Synthetic peptide
VGGYNYVSWY

SEQ ID NO: 3593 - protein, 10 aa, synthetic construct
  REGION 1..10: note = Description of Artificial Sequence: Synthetic peptide
LMIYEVSNRP

SEQ ID NO: 3594 - protein, 8 aa, synthetic construct
  REGION 1..8: note = Description of Artificial Sequence: Synthetic peptide
SSYTSTSV

SEQ ID NO: 3595 - protein, 8 aa, synthetic construct
  REGION 1..8: note = Description of Artificial Sequence: Synthetic peptide
GGSISNYY

SEQ ID NO: 3596 - protein, 7 aa, synthetic construct
  REGION 1..7: note = Description of Artificial Sequence: Synthetic peptide
IYSSGIT

SEQ ID NO: 3597 - protein, 12 aa, synthetic construct
  REGION 1..12: note = Description of Artificial Sequence: Synthetic peptide
AGIVGVKGAFAI

SEQ ID NO: 3598 - protein, 9 aa, synthetic construct
  REGION 1..9: note = Description of Artificial Sequence: Synthetic peptide
SSDVGGYNY

SEQ ID NO: 3599 - skipped

SEQ ID NO: 3600 - protein, 9 aa, synthetic construct
  REGION 1..9: note = Description of Artificial Sequence: Synthetic peptide
SSYTSTSVV

SEQ ID NO: 3601 - protein, 118 aa, synthetic construct; identical to SEQ ID NO: 3329
  REGION 1..118: note = Description of Artificial Sequence: Synthetic polypeptide

SEQ ID NO: 3602 - protein, 109 aa, synthetic construct; identical to SEQ ID NO: 3364
  REGION 1..109: note = Description of Artificial Sequence: Synthetic polypeptide

SEQ ID NO: 3603 - protein, 448 aa, synthetic construct; identical to SEQ ID NO: 3331
  REGION 1..448: note = Description of Artificial Sequence: Synthetic polypeptide

SEQ ID NO: 3604 - protein, 215 aa, synthetic construct; identical to SEQ ID NO: 3366
  REGION 1..215: note = Description of Artificial Sequence: Synthetic polypeptide

SEQ ID NO: 3605 - protein, 5 aa, synthetic construct
  REGION 1..5: note = Description of Artificial Sequence: Synthetic peptide
NYYWS

SEQ ID NO: 3606 - protein, 16 aa, synthetic construct
  REGION 1..16: note = Description of Artificial Sequence: Synthetic peptide
RIYSSGITNYNPSLKS

SEQ ID NO: 3607 - protein, 10 aa, synthetic construct
  REGION 1..10: note = Description of Artificial Sequence: Synthetic peptide
IVGVKGAFAI

SEQ ID NO: 3608 - protein, 14 aa, synthetic construct
  REGION 1..14: note = Description of Artificial Sequence: Synthetic peptide
TGTSSDVGGYNYVS

SEQ ID NO: 3609 - protein, 7 aa, synthetic construct
  REGION 1..7: note = Description of Artificial Sequence: Synthetic peptide
EVSNRPS

SEQ ID NO: 3610 - protein, 9 aa, synthetic construct
  REGION 1..9: note = Description of Artificial Sequence: Synthetic peptide
SSYTSTSVV

SEQ ID NO: 3611 - protein, 7 aa, synthetic construct
  REGION 1..7: note = Description of Artificial Sequence: Synthetic peptide
GGSISNY

SEQ ID NO: 3612 - protein, 5 aa, synthetic construct
  REGION 1..5: note = Description of Artificial Sequence: Synthetic peptide
YSSGI

SEQ ID NO: 3613 - protein, 9 aa, synthetic construct
  REGION 1..9: note = Description of Artificial Sequence: Synthetic peptide
IVGVKGAFA

SEQ ID NO: 3614 - protein, 10 aa, synthetic construct
  REGION 1..10: note = Description of Artificial Sequence: Synthetic peptide
TSSDVGGYNY

SEQ ID NO: 3615 - skipped

SEQ ID NO: 3616 - protein, 6 aa, synthetic construct
  REGION 1..6: note = Description of Artificial Sequence: Synthetic peptide
YTSTSV

SEQ ID NO: 3617 - protein, 10 aa, synthetic construct
  REGION 1..10: note = Description of Artificial Sequence: Synthetic peptide
GGSISNYYWS

SEQ ID NO: 3618 - protein, 9 aa, synthetic construct
  REGION 1..9: note = Description of Artificial Sequence: Synthetic peptide
RIYSSGITN

SEQ ID NO: 3619 - protein, 10 aa, synthetic construct
  REGION 1..10: note = Description of Artificial Sequence: Synthetic peptide
IVGVKGAFAI

SEQ ID NO: 3620 - protein, 14 aa, synthetic construct
  REGION 1..14: note = Description of Artificial Sequence: Synthetic peptide
TGTSSDVGGYNYVS

SEQ ID NO: 3621 - protein, 7 aa, synthetic construct
  REGION 1..7: note = Description of Artificial Sequence: Synthetic peptide
EVSNRPS

SEQ ID NO: 3622 - protein, 9 aa, synthetic construct
  REGION 1..9: note = Description of Artificial Sequence: Synthetic peptide
SSYTSTSVV

SEQ ID NO: 3623 - protein, 6 aa, synthetic construct
  REGION 1..6: note = Description of Artificial Sequence: Synthetic peptide
SNYYWS

SEQ ID NO: 3624 - protein, 12 aa, synthetic construct
  REGION 1..12: note = Description of Artificial Sequence: Synthetic peptide
WIGRIYSSGITN

SEQ ID NO: 3625 - protein, 11 aa, synthetic construct
  REGION 1..11: note = Description of Artificial Sequence: Synthetic peptide
AGIVGVKGAFA

SEQ ID NO: 3626 - protein, 10 aa, synthetic construct
  REGION 1..10: note = Description of Artificial Sequence: Synthetic peptide
VGGYNYVSWY

SEQ ID NO: 3627 - protein, 10 aa, synthetic construct
  REGION 1..10: note = Description of Artificial Sequence: Synthetic peptide
LMIYEVSNRP

SEQ ID NO: 3628 - protein, 8 aa, synthetic construct
  REGION 1..8: note = Description of Artificial Sequence: Synthetic peptide
SSYTSTSV

SEQ ID NO: 3629 - protein, 8 aa, synthetic construct
  REGION 1..8: note = Description of Artificial Sequence: Synthetic peptide
GGSISNYY

SEQ ID NO: 3630 - protein, 7 aa, synthetic construct
  REGION 1..7: note = Description of Artificial Sequence: Synthetic peptide
IYSSGIT

SEQ ID NO: 3631 - protein, 12 aa, synthetic construct
  REGION 1..12: note = Description of Artificial Sequence: Synthetic peptide
AGIVGVKGAFAI

SEQ ID NO: 3632 - protein, 9 aa, synthetic construct
  REGION 1..9: note = Description of Artificial Sequence: Synthetic peptide
SSDVGGYNY

SEQ ID NO: 3633 - skipped

SEQ ID NO: 3634 - protein, 9 aa, synthetic construct
  REGION 1..9: note = Description of Artificial Sequence: Synthetic peptide
SSYTSTSVV

SEQ ID NO: 3635 - protein, 118 aa, synthetic construct
  REGION 1..118: note = Description of Artificial Sequence: Synthetic polypeptide
QVQLVESGPGLVKPSETLSLTCTVSGGSISNYYWSWIRQPAGKGLGWIGRIYSSGITNYNPSLKSRVTMSVDTSKNQLSLKLSSVTAADTAVYYCAGIVGVKGAFAIWGQGTMVTVSS

SEQ ID NO: 3636 - protein, 109 aa, synthetic construct
  REGION 1..109: note = Description of Artificial Sequence: Synthetic polypeptide
SYELTQPASVSGSPGQSITISCTGTSSDVGGYNYVSWYQQHPGKAPKLMIYEVSNRPSGVSNRFSGSKSGNTASLTISGLQAEDEADYYCSSYTSTSVVFGGGTKLTVL

SEQ ID NO: 3637 - protein, 448 aa, synthetic construct
  REGION 1..448: note = Description of Artificial Sequence: Synthetic polypeptide
QVQLVESGPGLVKPSETLSLTCTVSGGSISNYYWSWIRQPAGKGLGWIGRIYSSGITNYNPSLKSRVTMSVDTSKNQLSLKLSSVTAADTAVYYCAGIVGVKGAFAIWGQGTMVTVSSASTKGPSVFPLAPSSKSTSGGTAALGCLVKDYFPEPVTVSWNSGALTSGVHTFPAVLQSSGLYSLSSVVTVPSSSLGTQTYICNVNHKPSNTKVDKKVEPKSCDKTHTCPPCPAPELLGGPSVFLFPPKPKDTLMISRTPEVTCVVVDVSHEDPEVKFNWYVDGVEVHNAKTKPREEQYNSTYRVVSVLTVLHQDWLNGKEYKCKVSNKALPAPIEKTISKAKGQPREPQVYTLPPSREEMTKNQVSLTCLVKGFYPSDIAVEWESNGQPENNYKTTPPVLDSDGSFFLYSKLTVDKSRWQQGNVFSCSVMHEALHNHYTQKSLSLSPGK

SEQ ID NO: 3638 - protein, 215 aa, synthetic construct
  REGION 1..215: note = Description of Artificial Sequence: Synthetic polypeptide
SYELTQPASVSGSPGQSITISCTGTSSDVGGYNYVSWYQQHPGKAPKLMIYEVSNRPSGVSNRFSGSKSGNTASLTISGLQAEDEADYYCSSYTSTSVVFGGGTKLTVLGQPKAAPSVTLFPPSSEELQANKATLVCLISDFYPGAVTVAWKADSSPVKAGVETTTPSKQSNNKYAASSYLSLTPEQWKSHRSYSCQVTHEGSTVEKTVAPTECS

SEQ ID NO: 3639 - protein, 5 aa, synthetic construct
  REGION 1..5: note = Description of Artificial Sequence: Synthetic peptide
NYYWS

SEQ ID NO: 3640 - protein, 16 aa, synthetic construct
  REGION 1..16: note = Description of Artificial Sequence: Synthetic peptide
RIYSSGITNYNPSLKS

SEQ ID NO: 3641 - protein, 10 aa, synthetic construct
  REGION 1..10: note = Description of Artificial Sequence: Synthetic peptide
IVGVKGAFAI

SEQ ID NO: 3642 - protein, 14 aa, synthetic construct
  REGION 1..14: note = Description of Artificial Sequence: Synthetic peptide
TGTSSDVGGYNYVS

SEQ ID NO: 3643 - protein, 7 aa, synthetic construct
  REGION 1..7: note = Description of Artificial Sequence: Synthetic peptide
EVSNRPS

SEQ ID NO: 3644 - protein, 9 aa, synthetic construct
  REGION 1..9: note = Description of Artificial Sequence: Synthetic peptide
SSYTSTSVV

SEQ ID NO: 3645 - protein, 7 aa, synthetic construct
  REGION 1..7: note = Description of Artificial Sequence: Synthetic peptide
GGSISNY

SEQ ID NO: 3646 - protein, 5 aa, synthetic construct
  REGION 1..5: note = Description of Artificial Sequence: Synthetic peptide
YSSGI

SEQ ID NO: 3647 - protein, 9 aa, synthetic construct
  REGION 1..9: note = Description of Artificial Sequence: Synthetic peptide
IVGVKGAFA

SEQ ID NO: 3648 - protein, 10 aa, synthetic construct
  REGION 1..10: note = Description of Artificial Sequence: Synthetic peptide
TSSDVGGYNY

SEQ ID NO: 3649 - skipped

SEQ ID NO: 3650 - protein, 6 aa, synthetic construct
  REGION 1..6: note = Description of Artificial Sequence: Synthetic peptide
YTSTSV

SEQ ID NO: 3651 - protein, 10 aa, synthetic construct
  REGION 1..10: note = Description of Artificial Sequence: Synthetic peptide
GGSISNYYWS

SEQ ID NO: 3652 - protein, 9 aa, synthetic construct
  REGION 1..9: note = Description of Artificial Sequence: Synthetic peptide
RIYSSGITN

SEQ ID NO: 3653 - protein, 10 aa, synthetic construct
  REGION 1..10: note = Description of Artificial Sequence: Synthetic peptide
IVGVKGAFAI

SEQ ID NO: 3654 - protein, 14 aa, synthetic construct
  REGION 1..14: note = Description of Artificial Sequence: Synthetic peptide
TGTSSDVGGYNYVS

SEQ ID NO: 3655 - protein, 7 aa, synthetic construct
  REGION 1..7: note = Description of Artificial Sequence: Synthetic peptide
EVSNRPS

SEQ ID NO: 3656 - protein, 9 aa, synthetic construct
  REGION 1..9: note = Description of Artificial Sequence: Synthetic peptide
SSYTSTSVV

SEQ ID NO: 3657 - protein, 6 aa, synthetic construct
  REGION 1..6: note = Description of Artificial Sequence: Synthetic peptide
SNYYWS

SEQ ID NO: 3658 - protein, 12 aa, synthetic construct
  REGION 1..12: note = Description of Artificial Sequence: Synthetic peptide
WIGRIYSSGITN

SEQ ID NO: 3659 - protein, 11 aa, synthetic construct
  REGION 1..11: note = Description of Artificial Sequence: Synthetic peptide
AGIVGVKGAFA

SEQ ID NO: 3660 - protein, 10 aa, synthetic construct
  REGION 1..10: note = Description of Artificial Sequence: Synthetic peptide
VGGYNYVSWY

SEQ ID NO: 3661 - protein, 10 aa, synthetic construct
  REGION 1..10: note = Description of Artificial Sequence: Synthetic peptide
LMIYEVSNRP

SEQ ID NO: 3662 - protein, 8 aa, synthetic construct
  REGION 1..8: note = Description of Artificial Sequence: Synthetic peptide
SSYTSTSV

SEQ ID NO: 3663 - protein, 8 aa, synthetic construct
  REGION 1..8: note = Description of Artificial Sequence: Synthetic peptide
GGSISNYY

SEQ ID NO: 3664 - protein, 7 aa, synthetic construct
  REGION 1..7: note = Description of Artificial Sequence: Synthetic peptide
IYSSGIT

SEQ ID NO: 3665 - protein, 12 aa, synthetic construct
  REGION 1..12: note = Description of Artificial Sequence: Synthetic peptide
AGIVGVKGAFAI

SEQ ID NO: 3666 - protein, 9 aa, synthetic construct
  REGION 1..9: note = Description of Artificial Sequence: Synthetic peptide
SSDVGGYNY

SEQ ID NO: 3667 - skipped

SEQ ID NO: 3668 - protein, 9 aa, synthetic construct
  REGION 1..9: note = Description of Artificial Sequence: Synthetic peptide
SSYTSTSVV

SEQ ID NO: 3669 - protein, 118 aa, synthetic construct; identical to SEQ ID NO: 3227
  REGION 1..118: note = Description of Artificial Sequence: Synthetic polypeptide

SEQ ID NO: 3670 - protein, 109 aa, synthetic construct; identical to SEQ ID NO: 3636
  REGION 1..109: note = Description of Artificial Sequence: Synthetic polypeptide

SEQ ID NO: 3671 - protein, 448 aa, synthetic construct; identical to SEQ ID NO: 3229
  REGION 1..448: note = Description of Artificial Sequence: Synthetic polypeptide

SEQ ID NO: 3672 - protein, 215 aa, synthetic construct; identical to SEQ ID NO: 3638
  REGION 1..215: note = Description of Artificial Sequence: Synthetic polypeptide

SEQ ID NO: 3673 - protein, 5 aa, synthetic construct
  REGION 1..5: note = Description of Artificial Sequence: Synthetic peptide
NYYWS

SEQ ID NO: 3674 - protein, 16 aa, synthetic construct
  REGION 1..16: note = Description of Artificial Sequence: Synthetic peptide
RIYSSGITNYNPSLKS

SEQ ID NO: 3675 - protein, 10 aa, synthetic construct
  REGION 1..10: note = Description of Artificial Sequence: Synthetic peptide
IVGVKGAFAI

SEQ ID NO: 3676 - protein, 14 aa, synthetic construct
  REGION 1..14: note = Description of Artificial Sequence: Synthetic peptide
TGTSSDVGGYNYVS

SEQ ID NO: 3677 - protein, 7 aa, synthetic construct
  REGION 1..7: note = Description of Artificial Sequence: Synthetic peptide
EVSNRPS

SEQ ID NO: 3678 - protein, 9 aa, synthetic construct
  REGION 1..9: note = Description of Artificial Sequence: Synthetic peptide
SSYTSTSVV

SEQ ID NO: 3679 - protein, 7 aa, synthetic construct
  REGION 1..7: note = Description of Artificial Sequence: Synthetic peptide
GGSISNY

SEQ ID NO: 3680 - protein, 5 aa, synthetic construct
  REGION 1..5: note = Description of Artificial Sequence: Synthetic peptide
YSSGI

SEQ ID NO: 3681 - protein, 9 aa, synthetic construct
  REGION 1..9: note = Description of Artificial Sequence: Synthetic peptide
IVGVKGAFA

SEQ ID NO: 3682 - protein, 10 aa, synthetic construct
  REGION 1..10: note = Description of Artificial Sequence: Synthetic peptide
TSSDVGGYNY

SEQ ID NO: 3683 - skipped

SEQ ID NO: 3684 - protein, 6 aa, synthetic construct
  REGION 1..6: note = Description of Artificial Sequence: Synthetic peptide
YTSTSV

SEQ ID NO: 3685 - protein, 10 aa, synthetic construct
  REGION 1..10: note = Description of Artificial Sequence: Synthetic peptide
GGSISNYYWS

SEQ ID NO: 3686 - protein, 9 aa, synthetic construct
  REGION 1..9: note = Description of Artificial Sequence: Synthetic peptide
RIYSSGITN

SEQ ID NO: 3687 - protein, 10 aa, synthetic construct
  REGION 1..10: note = Description of Artificial Sequence: Synthetic peptide
IVGVKGAFAI

SEQ ID NO: 3688 - protein, 14 aa, synthetic construct
  REGION 1..14: note = Description of Artificial Sequence: Synthetic peptide
TGTSSDVGGYNYVS

SEQ ID NO: 3689 - protein, 7 aa, synthetic construct
  REGION 1..7: note = Description of Artificial Sequence: Synthetic peptide
EVSNRPS

SEQ ID NO: 3690 - protein, 9 aa, synthetic construct
  REGION 1..9: note = Description of Artificial Sequence: Synthetic peptide
SSYTSTSVV

SEQ ID NO: 3691 - protein, 6 aa, synthetic construct
  REGION 1..6: note = Description of Artificial Sequence: Synthetic peptide
SNYYWS

SEQ ID NO: 3692 - protein, 12 aa, synthetic construct
  REGION 1..12: note = Description of Artificial Sequence: Synthetic peptide
WIGRIYSSGITN

SEQ ID NO: 3693 - protein, 11 aa, synthetic construct
  REGION 1..11: note = Description of Artificial Sequence: Synthetic peptide
AGIVGVKGAFA

SEQ ID NO: 3694 - protein, 10 aa, synthetic construct
  REGION 1..10: note = Description of Artificial Sequence: Synthetic peptide
VGGYNYVSWY

SEQ ID NO: 3695 - protein, 10 aa, synthetic construct
  REGION 1..10: note = Description of Artificial Sequence: Synthetic peptide
LMIYEVSNRP

SEQ ID NO: 3696 - protein, 8 aa, synthetic construct
  REGION 1..8: note = Description of Artificial Sequence: Synthetic peptide
SSYTSTSV

SEQ ID NO: 3697 - protein, 8 aa, synthetic construct
  REGION 1..8: note = Description of Artificial Sequence: Synthetic peptide
GGSISNYY

SEQ ID NO: 3698 - protein, 7 aa, synthetic construct
  REGION 1..7: note = Description of Artificial Sequence: Synthetic peptide
IYSSGIT

SEQ ID NO: 3699 - protein, 12 aa, synthetic construct
  REGION 1..12: note = Description of Artificial Sequence: Synthetic peptide
AGIVGVKGAFAI

SEQ ID NO: 3700 - protein, 9 aa, synthetic construct
  REGION 1..9: note = Description of Artificial Sequence: Synthetic peptide
SSDVGGYNY

SEQ ID NO: 3701 - skipped

SEQ ID NO: 3702 - protein, 9 aa, synthetic construct
  REGION 1..9: note = Description of Artificial Sequence: Synthetic peptide
SSYTSTSVV

SEQ ID NO: 3703 - protein, 118 aa, synthetic construct
  REGION 1..118: note = Description of Artificial Sequence: Synthetic polypeptide
EVQLQESGPGLVKPSETLSLTCTVSGGSISNYYWSWIRQPAGKGLGWIGRIYSSGITNYNPSLKSRVTMSVDTSKNQLSLKLSSVTAADTAVYYCAGIVGVKGAFAIWGQGTMVTVSS

SEQ ID NO: 3704 - protein, 109 aa, synthetic construct; identical to SEQ ID NO: 3058
  REGION 1..109: note = Description of Artificial Sequence: Synthetic polypeptide

SEQ ID NO: 3705 - protein, 448 aa, synthetic construct
  REGION 1..448: note = Description of Artificial Sequence: Synthetic polypeptide
EVQLQESGPGLVKPSETLSLTCTVSGGSISNYYWSWIRQPAGKGLGWIGRIYSSGITNYNPSLKSRVTMSVDTSKNQLSLKLSSVTAADTAVYYCAGIVGVKGAFAIWGQGTMVTVSSASTKGPSVFPLAPSSKSTSGGTAALGCLVKDYFPEPVTVSWNSGALTSGVHTFPAVLQSSGLYSLSSVVTVPSSSLGTQTYICNVNHKPSNTKVDKKVEPKSCDKTHTCPPCPAPELLGGPSVFLFPPKPKDTLMISRTPEVTCVVVDVSHEDPEVKFNWYVDGVEVHNAKTKPREEQYNSTYRVVSVLTVLHQDWLNGKEYKCKVSNKALPAPIEKTISKAKGQPREPQVYTLPPSREEMTKNQVSLTCLVKGFYPSDIAVEWESNGQPENNYKTTPPVLDSDGSFFLYSKLTVDKSRWQQGNVFSCSVMHEALHNHYTQKSLSLSPGK

SEQ ID NO: 3706 - protein, 215 aa, synthetic construct; identical to SEQ ID NO: 3060
  REGION 1..215: note = Description of Artificial Sequence: Synthetic polypeptide

SEQ ID NO: 3707 - protein, 5 aa, synthetic construct
  REGION 1..5: note = Description of Artificial Sequence: Synthetic peptide
NYYWS

SEQ ID NO: 3708 - protein, 16 aa, synthetic construct
  REGION 1..16: note = Description of Artificial Sequence: Synthetic peptide
RIYSSGITNYNPSLKS

SEQ ID NO: 3709 - protein, 10 aa, synthetic construct
  REGION 1..10: note = Description of Artificial Sequence: Synthetic peptide
IVGVKGAFAI

SEQ ID NO: 3710 - protein, 14 aa, synthetic construct
  REGION 1..14: note = Description of Artificial Sequence: Synthetic peptide
TGTSSDVGGYNYVS

SEQ ID NO: 3711 - protein, 7 aa, synthetic construct
  REGION 1..7: note = Description of Artificial Sequence: Synthetic peptide
EVSNRPS

SEQ ID NO: 3712 - protein, 9 aa, synthetic construct
  REGION 1..9: note = Description of Artificial Sequence: Synthetic peptide
SSYTSTSVV

SEQ ID NO: 3713 - protein, 7 aa, synthetic construct
  REGION 1..7: note = Description of Artificial Sequence: Synthetic peptide
GGSISNY

SEQ ID NO: 3714 - protein, 5 aa, synthetic construct
  REGION 1..5: note = Description of Artificial Sequence: Synthetic peptide
YSSGI

SEQ ID NO: 3715 - protein, 9 aa, synthetic construct
  REGION 1..9: note = Description of Artificial Sequence: Synthetic peptide
IVGVKGAFA

SEQ ID NO: 3716 - protein, 10 aa, synthetic construct
  REGION 1..10: note = Description of Artificial Sequence: Synthetic peptide
TSSDVGGYNY

SEQ ID NO: 3717 - skipped

SEQ ID NO: 3718 - protein, 6 aa, synthetic construct
  REGION 1..6: note = Description of Artificial Sequence: Synthetic peptide
YTSTSV

SEQ ID NO: 3719 - protein, 10 aa, synthetic construct
  REGION 1..10: note = Description of Artificial Sequence: Synthetic peptide
GGSISNYYWS

SEQ ID NO: 3720 - protein, 9 aa, synthetic construct
  REGION 1..9: note = Description of Artificial Sequence: Synthetic peptide
RIYSSGITN

SEQ ID NO: 3721 - protein, 10 aa, synthetic construct
  REGION 1..10: note = Description of Artificial Sequence: Synthetic peptide
IVGVKGAFAI

SEQ ID NO: 3722 - protein, 14 aa, synthetic construct
  REGION 1..14: note = Description of Artificial Sequence: Synthetic peptide
TGTSSDVGGYNYVS

SEQ ID NO: 3723 - protein, 7 aa, synthetic construct
  REGION 1..7: note = Description of Artificial Sequence: Synthetic peptide
EVSNRPS

SEQ ID NO: 3724 - protein, 9 aa, synthetic construct
  REGION 1..9: note = Description of Artificial Sequence: Synthetic peptide
SSYTSTSVV

SEQ ID NO: 3725 - protein, 6 aa, synthetic construct
  REGION 1..6: note = Description of Artificial Sequence: Synthetic peptide
SNYYWS

SEQ ID NO: 3726 - protein, 12 aa, synthetic construct
  REGION 1..12: note = Description of Artificial Sequence: Synthetic peptide
WIGRIYSSGITN

SEQ ID NO: 3727 - protein, 11 aa, synthetic construct
  REGION 1..11: note = Description of Artificial Sequence: Synthetic peptide
AGIVGVKGAFA

SEQ ID NO: 3728 - protein, 10 aa, synthetic construct
  REGION 1..10: note = Description of Artificial Sequence: Synthetic peptide
VGGYNYVSWY

SEQ ID NO: 3729 - protein, 10 aa, synthetic construct
  REGION 1..10: note = Description of Artificial Sequence: Synthetic peptide
LMIYEVSNRP

SEQ ID NO: 3730 - protein, 8 aa, synthetic construct
  REGION 1..8: note = Description of Artificial Sequence: Synthetic peptide
SSYTSTSV

SEQ ID NO: 3731 - protein, 8 aa, synthetic construct
  REGION 1..8: note = Description of Artificial Sequence: Synthetic peptide
GGSISNYY

SEQ ID NO: 3732 - protein, 7 aa, synthetic construct
  REGION 1..7: note = Description of Artificial Sequence: Synthetic peptide
IYSSGIT

SEQ ID NO: 3733 - protein, 12 aa, synthetic construct
  REGION 1..12: note = Description of Artificial Sequence: Synthetic peptide
AGIVGVKGAFAI

SEQ ID NO: 3734 - protein, 9 aa, synthetic construct
  REGION 1..9: note = Description of Artificial Sequence: Synthetic peptide
SSDVGGYNY

SEQ ID NO: 3735 - skipped

SEQ ID NO: 3736 - protein, 9 aa, synthetic construct
  REGION 1..9: note = Description of Artificial Sequence: Synthetic peptide
SSYTSTSVV

SEQ ID NO: 3737 - protein, 118 aa, synthetic construct
  REGION 1..118: note = Description of Artificial Sequence: Synthetic polypeptide
EVQLVESGPGLVKPSETLSLTCTVSGGSISNYYWSWIRQPAGKGLGWIGRIYSSGITNYNPSLKSRVTMSVDTSKNQLSLKLSSVTAADTAVYYCAGIVGVKGAFAIWGQGTMVTVSS

SEQ ID NO: 3738 - protein, 109 aa, synthetic construct; identical to SEQ ID NO: 3636
  REGION 1..109: note = Description of Artificial Sequence: Synthetic polypeptide

SEQ ID NO: 3739 - protein, 448 aa, synthetic construct
  REGION 1..448: note = Description of Artificial Sequence: Synthetic polypeptide
EVQLVESGPGLVKPSETLSLTCTVSGGSISNYYWSWIRQPAGKGLGWIGRIYSSGITNYNPSLKSRVTMSVDTSKNQLSLKLSSVTAADTAVYYCAGIVGVKGAFAIWGQGTMVTVSSASTKGPSVFPLAPSSKSTSGGTAALGCLVKDYFPEPVTVSWNSGALTSGVHTFPAVLQSSGLYSLSSVVTVPSSSLGTQTYICNVNHKPSNTKVDKKVEPKSCDKTHTCPPCPAPELLGGPSVFLFPPKPKDTLMISRTPEVTCVVVDVSHEDPEVKFNWYVDGVEVHNAKTKPREEQYNSTYRVVSVLTVLHQDWLNGKEYKCKVSNKALPAPIEKTISKAKGQPREPQVYTLPPSREEMTKNQVSLTCLVKGFYPSDIAVEWESNGQPENNYKTTPPVLDSDGSFFLYSKLTVDKSRWQQGNVFSCSVMHEALHNHYTQKSLSLSPGK

SEQ ID NO: 3740 - protein, 215 aa, synthetic construct; identical to SEQ ID NO: 3638
  REGION 1..215: note = Description of Artificial Sequence: Synthetic polypeptide

SEQ ID NO: 3741 - protein, 5 aa, synthetic construct
  REGION 1..5: note = Description of Artificial Sequence: Synthetic peptide
NYYWS

SEQ ID NO: 3742 - protein, 16 aa, synthetic construct
  REGION 1..16: note = Description of Artificial Sequence: Synthetic peptide
RIYSSGITNYNPSLKS

SEQ ID NO: 3743 - protein, 10 aa, synthetic construct
  REGION 1..10: note = Description of Artificial Sequence: Synthetic peptide
IVGVKGAFAI

SEQ ID NO: 3744 - protein, 14 aa, synthetic construct
  REGION 1..14: note = Description of Artificial Sequence: Synthetic peptide
TGTSSDVGGYNYVS

SEQ ID NO: 3745 - protein, 7 aa, synthetic construct
  REGION 1..7: note = Description of Artificial Sequence: Synthetic peptide
EVSNRPS

SEQ ID NO: 3746 - protein, 9 aa, synthetic construct
  REGION 1..9: note = Description of Artificial Sequence: Synthetic peptide
SSYTSTSVV

SEQ ID NO: 3747 - protein, 7 aa, synthetic construct
  REGION 1..7: note = Description of Artificial Sequence: Synthetic peptide
GGSISNY

SEQ ID NO: 3748 - protein, 5 aa, synthetic construct
  REGION 1..5: note = Description of Artificial Sequence: Synthetic peptide
YSSGI

SEQ ID NO: 3749 - protein, 9 aa, synthetic construct
  REGION 1..9: note = Description of Artificial Sequence: Synthetic peptide
IVGVKGAFA

SEQ ID NO: 3750 - protein, 10 aa, synthetic construct
  REGION 1..10: note = Description of Artificial Sequence: Synthetic peptide
TSSDVGGYNY

SEQ ID NO: 3751 - skipped

SEQ ID NO: 3752 - protein, 6 aa, synthetic construct
  REGION 1..6: note = Description of Artificial Sequence: Synthetic peptide
YTSTSV

SEQ ID NO: 3753 - protein, 10 aa, synthetic construct
  REGION 1..10: note = Description of Artificial Sequence: Synthetic peptide
GGSISNYYWS

SEQ ID NO: 3754 - protein, 9 aa, synthetic construct
  REGION 1..9: note = Description of Artificial Sequence: Synthetic peptide
RIYSSGITN

SEQ ID NO: 3755 - protein, 10 aa, synthetic construct
  REGION 1..10: note = Description of Artificial Sequence: Synthetic peptide
IVGVKGAFAI

SEQ ID NO: 3756 - protein, 14 aa, synthetic construct
  REGION 1..14: note = Description of Artificial Sequence: Synthetic peptide
TGTSSDVGGYNYVS

SEQ ID NO: 3757 - protein, 7 aa, synthetic construct
  REGION 1..7: note = Description of Artificial Sequence: Synthetic peptide
EVSNRPS

SEQ ID NO: 3758 - protein, 9 aa, synthetic construct
  REGION 1..9: note = Description of Artificial Sequence: Synthetic peptide
SSYTSTSVV

SEQ ID NO: 3759 - protein, 6 aa, synthetic construct
  REGION 1..6: note = Description of Artificial Sequence: Synthetic peptide
SNYYWS

SEQ ID NO: 3760 - protein, 12 aa, synthetic construct
  REGION 1..12: note = Description of Artificial Sequence: Synthetic peptide
WIGRIYSSGITN

SEQ ID NO: 3761 - protein, 11 aa, synthetic construct
  REGION 1..11: note = Description of Artificial Sequence: Synthetic peptide
AGIVGVKGAFA

SEQ ID NO: 3762 - protein, 10 aa, synthetic construct
  REGION 1..10: note = Description of Artificial Sequence: Synthetic peptide
VGGYNYVSWY

SEQ ID NO: 3763 - protein, 10 aa, synthetic construct
  REGION 1..10: note = Description of Artificial Sequence: Synthetic peptide
LMIYEVSNRP

SEQ ID NO: 3764 - protein, 8 aa, synthetic construct
  REGION 1..8: note = Description of Artificial Sequence: Synthetic peptide
SSYTSTSV

SEQ ID NO: 3765 - protein, 8 aa, synthetic construct
  REGION 1..8: note = Description of Artificial Sequence: Synthetic peptide
GGSISNYY

SEQ ID NO: 3766 - protein, 7 aa, synthetic construct
  REGION 1..7: note = Description of Artificial Sequence: Synthetic peptide
IYSSGIT

SEQ ID NO: 3767 - protein, 12 aa, synthetic construct
  REGION 1..12: note = Description of Artificial Sequence: Synthetic peptide
AGIVGVKGAFAI

SEQ ID NO: 3768 - protein, 9 aa, synthetic construct
  REGION 1..9: note = Description of Artificial Sequence: Synthetic peptide
SSDVGGYNY

SEQ ID NO: 3769 - skipped

SEQ ID NO: 3770 - protein, 9 aa, synthetic construct
  REGION 1..9: note = Description of Artificial Sequence: Synthetic peptide
SSYTSTSVV

SEQ ID NO: 3771 - protein, 118 aa, synthetic construct
  REGION 1..118: note = Description of Artificial Sequence: Synthetic polypeptide
EVQLVQSGPGLVKPSETLSLTCTVSGGSISNYYWSWIRQPAGKGLGWIGRIYSSGITNYNPSLKSRVTMSVDTSKNQLSLKLSSVTAADTAVYYCAGIVGVKGAFAIWGQGTTVTVSS

SEQ ID NO: 3772 - protein, 109 aa, synthetic construct; identical to SEQ ID NO: 3364
  REGION 1..109: note = Description of Artificial Sequence: Synthetic polypeptide

SEQ ID NO: 3773 - protein, 448 aa, synthetic construct
  REGION 1..448: note = Description of Artificial Sequence: Synthetic polypeptide
EVQLVQSGPGLVKPSETLSLTCTVSGGSISNYYWSWIRQPAGKGLGWIGRIYSSGITNYNPSLKSRVTMSVDTSKNQLSLKLSSVTAADTAVYYCAGIVGVKGAFAIWGQGTTVTVSSASTKGPSVFPLAPSSKSTSGGTAALGCLVKDYFPEPVTVSWNSGALTSGVHTFPAVLQSSGLYSLSSVVTVPSSSLGTQTYICNVNHKPSNTKVDKKVEPKSCDKTHTCPPCPAPELLGGPSVFLFPPKPKDTLMISRTPEVTCVVVDVSHEDPEVKFNWYVDGVEVHNAKTKPREEQYNSTYRVVSVLTVLHQDWLNGKEYKCKVSNKALPAPIEKTISKAKGQPREPQVYTLPPSREEMTKNQVSLTCLVKGFYPSDIAVEWESNGQPENNYKTTPPVLDSDGSFFLYSKLTVDKSRWQQGNVFSCSVMHEALHNHYTQKSLSLSPGK

SEQ ID NO: 3774 - protein, 215 aa, synthetic construct; identical to SEQ ID NO: 3366
  REGION 1..215: note = Description of Artificial Sequence: Synthetic polypeptide

SEQ ID NO: 3775 - protein, 5 aa, synthetic construct
  REGION 1..5: note = Description of Artificial Sequence: Synthetic peptide
NYYWS

SEQ ID NO: 3776 - protein, 16 aa, synthetic construct
  REGION 1..16: note = Description of Artificial Sequence: Synthetic peptide
RIYSSGITNYNPSLKS

SEQ ID NO: 3777 - protein, 10 aa, synthetic construct
  REGION 1..10: note = Description of Artificial Sequence: Synthetic peptide
IVGVKGAFAI

SEQ ID NO: 3778 - protein, 14 aa, synthetic construct
  REGION 1..14: note = Description of Artificial Sequence: Synthetic peptide
TGTSSDVGGYNYVS

SEQ ID NO: 3779 - protein, 7 aa, synthetic construct
  REGION 1..7: note = Description of Artificial Sequence: Synthetic peptide
EVSNRPS

SEQ ID NO: 3780 - protein, 9 aa, synthetic construct
  REGION 1..9: note = Description of Artificial Sequence: Synthetic peptide
SSYTSTSVV

SEQ ID NO: 3781 - protein, 7 aa, synthetic construct
  REGION 1..7: note = Description of Artificial Sequence: Synthetic peptide
GGSISNY

SEQ ID NO: 3782 - protein, 5 aa, synthetic construct
  REGION 1..5: note = Description of Artificial Sequence: Synthetic peptide
YSSGI

SEQ ID NO: 3783 - protein, 9 aa, synthetic construct
  REGION 1..9: note = Description of Artificial Sequence: Synthetic peptide
IVGVKGAFA

SEQ ID NO: 3784 - protein, 10 aa, synthetic construct
  REGION 1..10: note = Description of Artificial Sequence: Synthetic peptide
TSSDVGGYNY

SEQ ID NO: 3785 - skipped

SEQ ID NO: 3786 - protein, 6 aa, synthetic construct
  REGION 1..6: note = Description of Artificial Sequence: Synthetic peptide
YTSTSV

SEQ ID NO: 3787 - protein, 10 aa, synthetic construct
  REGION 1..10: note = Description of Artificial Sequence: Synthetic peptide
GGSISNYYWS

SEQ ID NO: 3788 - protein, 9 aa, synthetic construct
  REGION 1..9: note = Description of Artificial Sequence: Synthetic peptide
RIYSSGITN

SEQ ID NO: 3789 - protein, 10 aa, synthetic construct
  REGION 1..10: note = Description of Artificial Sequence: Synthetic peptide
IVGVKGAFAI

SEQ ID NO: 3790 - protein, 14 aa, synthetic construct
  REGION 1..14: note = Description of Artificial Sequence: Synthetic peptide
TGTSSDVGGYNYVS

SEQ ID NO: 3791 - protein, 7 aa, synthetic construct
  REGION 1..7: note = Description of Artificial Sequence: Synthetic peptide
EVSNRPS

SEQ ID NO: 3792 - protein, 9 aa, synthetic construct
  REGION 1..9: note = Description of Artificial Sequence: Synthetic peptide
SSYTSTSVV

SEQ ID NO: 3793 - protein, 6 aa, synthetic construct
  REGION 1..6: note = Description of Artificial Sequence: Synthetic peptide
SNYYWS

SEQ ID NO: 3794 - protein, 12 aa, synthetic construct
  REGION 1..12: note = Description of Artificial Sequence: Synthetic peptide
WIGRIYSSGITN

SEQ ID NO: 3795 - protein, 11 aa, synthetic construct
  REGION 1..11: note = Description of Artificial Sequence: Synthetic peptide
AGIVGVKGAFA

SEQ ID NO: 3796 - protein, 10 aa, synthetic construct
  REGION 1..10: note = Description of Artificial Sequence: Synthetic peptide
VGGYNYVSWY

SEQ ID NO: 3797 - protein, 10 aa, synthetic construct
  REGION 1..10: note = Description of Artificial Sequence: Synthetic peptide
LMIYEVSNRP

SEQ ID NO: 3798 - protein, 8 aa, synthetic construct
  REGION 1..8: note = Description of Artificial Sequence: Synthetic peptide
SSYTSTSV

SEQ ID NO: 3799 - protein, 8 aa, synthetic construct
  REGION 1..8: note = Description of Artificial Sequence: Synthetic peptide
GGSISNYY

SEQ ID NO: 3800 - protein, 7 aa, synthetic construct
  REGION 1..7: note = Description of Artificial Sequence: Synthetic peptide
IYSSGIT

SEQ ID NO: 3801 - protein, 12 aa, synthetic construct
  REGION 1..12: note = Description of Artificial Sequence: Synthetic peptide
AGIVGVKGAFAI

SEQ ID NO: 3802 - protein, 9 aa, synthetic construct
  REGION 1..9: note = Description of Artificial Sequence: Synthetic peptide
SSDVGGYNY

SEQ ID NO: 3803 - skipped

SEQ ID NO: 3804 - protein, 9 aa, synthetic construct
  REGION 1..9: note = Description of Artificial Sequence: Synthetic peptide
SSYTSTSVV

SEQ ID NO: 3805 - protein, 118 aa, synthetic construct; identical to SEQ ID NO: 3703
  REGION 1..118: note = Description of Artificial Sequence: Synthetic polypeptide

SEQ ID NO: 3806 - protein, 109 aa, synthetic construct; identical to SEQ ID NO: 3364
  REGION 1..109: note = Description of Artificial Sequence: Synthetic polypeptide

SEQ ID NO: 3807 - protein, 448 aa, synthetic construct; identical to SEQ ID NO: 3705
  REGION 1..448: note = Description of Artificial Sequence: Synthetic polypeptide

SEQ ID NO: 3808 - protein, 215 aa, synthetic construct; identical to SEQ ID NO: 3366
  REGION 1..215: note = Description of Artificial Sequence: Synthetic polypeptide

SEQ ID NO: 3809 - protein, 5 aa, synthetic construct
  REGION 1..5: note = Description of Artificial Sequence: Synthetic peptide
NYYWS

SEQ ID NO: 3810 - protein, 16 aa, synthetic construct
  REGION 1..16: note = Description of Artificial Sequence: Synthetic peptide
RIYSSGITNYNPSLKS

SEQ ID NO: 3811 - protein, 10 aa, synthetic construct
  REGION 1..10: note = Description of Artificial Sequence: Synthetic peptide
IVGVKGAFAI

SEQ ID NO: 3812 - protein, 14 aa, synthetic construct
  REGION 1..14: note = Description of Artificial Sequence: Synthetic peptide
TGTSSDVGGYNYVS

SEQ ID NO: 3813 - protein, 7 aa, synthetic construct
  REGION 1..7: note = Description of Artificial Sequence: Synthetic peptide
EVSNRPS

SEQ ID NO: 3814 - protein, 9 aa, synthetic construct
  REGION 1..9: note = Description of Artificial Sequence: Synthetic peptide
SSYTSTSVV

SEQ ID NO: 3815 - protein, 7 aa, synthetic construct
  REGION 1..7: note = Description of Artificial Sequence: Synthetic peptide
GGSISNY

SEQ ID NO: 3816 - protein, 5 aa, synthetic construct
  REGION 1..5: note = Description of Artificial Sequence: Synthetic peptide
YSSGI

SEQ ID NO: 3817 - protein, 9 aa, synthetic construct
  REGION 1..9: note = Description of Artificial Sequence: Synthetic peptide
IVGVKGAFA

SEQ ID NO: 3818 - protein, 10 aa, synthetic construct
  REGION 1..10: note = Description of Artificial Sequence: Synthetic peptide
TSSDVGGYNY

SEQ ID NO: 3819 - skipped

SEQ ID NO: 3820 - protein, 6 aa, synthetic construct
  REGION 1..6: note = Description of Artificial Sequence: Synthetic peptide
YTSTSV

SEQ ID NO: 3821 - protein, 10 aa, synthetic construct
  REGION 1..10: note = Description of Artificial Sequence: Synthetic peptide
GGSISNYYWS

SEQ ID NO: 3822 - protein, 9 aa, synthetic construct
  REGION 1..9: note = Description of Artificial Sequence: Synthetic peptide
RIYSSGITN

SEQ ID NO: 3823 - protein, 10 aa, synthetic construct
  REGION 1..10: note = Description of Artificial Sequence: Synthetic peptide
IVGVKGAFAI

SEQ ID NO: 3824 - protein, 14 aa, synthetic construct
  REGION 1..14: note = Description of Artificial Sequence: Synthetic peptide
TGTSSDVGGYNYVS

SEQ ID NO: 3825 - protein, 7 aa, synthetic construct
  REGION 1..7: note = Description of Artificial Sequence: Synthetic peptide
EVSNRPS

SEQ ID NO: 3826 - protein, 9 aa, synthetic construct
  REGION 1..9: note = Description of Artificial Sequence: Synthetic peptide
SSYTSTSVV

SEQ ID NO: 3827 - protein, 6 aa, synthetic construct
  REGION 1..6: note = Description of Artificial Sequence: Synthetic peptide
SNYYWS

SEQ ID NO: 3828 - protein, 12 aa, synthetic construct
  REGION 1..12: note = Description of Artificial Sequence: Synthetic peptide
WIGRIYSSGITN

SEQ ID NO: 3829 - protein, 11 aa, synthetic construct
  REGION 1..11: note = Description of Artificial Sequence: Synthetic peptide
AGIVGVKGAFA

SEQ ID NO: 3830 - protein, 10 aa, synthetic construct
  REGION 1..10: note = Description of Artificial Sequence: Synthetic peptide
VGGYNYVSWY

SEQ ID NO: 3831 - protein, 10 aa, synthetic construct
  REGION 1..10: note = Description of Artificial Sequence: Synthetic peptide
LMIYEVSNRP

SEQ ID NO: 3832 - protein, 8 aa, synthetic construct
  REGION 1..8: note = Description of Artificial Sequence: Synthetic peptide
SSYTSTSV

SEQ ID NO: 3833 - protein, 8 aa, synthetic construct
  REGION 1..8: note = Description of Artificial Sequence: Synthetic peptide
GGSISNYY

SEQ ID NO: 3834 - protein, 7 aa, synthetic construct
  REGION 1..7: note = Description of Artificial Sequence: Synthetic peptide
IYSSGIT

SEQ ID NO: 3835 - protein, 12 aa, synthetic construct
  REGION 1..12: note = Description of Artificial Sequence: Synthetic peptide
AGIVGVKGAFAI

SEQ ID NO: 3836 - protein, 9 aa, synthetic construct
  REGION 1..9: note = Description of Artificial Sequence: Synthetic peptide
SSDVGGYNY

SEQ ID NO: 3837 - skipped

SEQ ID NO: 3838 - protein, 9 aa, synthetic construct
  REGION 1..9: note = Description of Artificial Sequence: Synthetic peptide
SSYTSTSVV

SEQ ID NO: 3839 - protein, 118 aa, synthetic construct; identical to SEQ ID NO: 3737
  REGION 1..118: note = Description of Artificial Sequence: Synthetic polypeptide

SEQ ID NO: 3840 - protein, 109 aa, synthetic construct; identical to SEQ ID NO: 3330
  REGION 1..109: note = Description of Artificial Sequence: Synthetic polypeptide

SEQ ID NO: 3841 - protein, 448 aa, synthetic construct; identical to SEQ ID NO: 3739
  REGION 1..448: note = Description of Artificial Sequence: Synthetic polypeptide

SEQ ID NO: 3842 - protein, 215 aa, synthetic construct; identical to SEQ ID NO: 3332
  REGION 1..215: note = Description of Artificial Sequence: Synthetic polypeptide

SEQ ID NO: 3843 - protein, 5 aa, synthetic construct
  REGION 1..5: note = Description of Artificial Sequence: Synthetic peptide
NYYWS

SEQ ID NO: 3844 - protein, 16 aa, synthetic construct
  REGION 1..16: note = Description of Artificial Sequence: Synthetic peptide
RIYSSGITNYNPSLKS

SEQ ID NO: 3845 - protein, 10 aa, synthetic construct
  REGION 1..10: note = Description of Artificial Sequence: Synthetic peptide
IVGVKGAFAI

SEQ ID NO: 3846 - protein, 14 aa, synthetic construct
  REGION 1..14: note = Description of Artificial Sequence: Synthetic peptide
TGTSSDVGGYNYVS

SEQ ID NO: 3847 - protein, 7 aa, synthetic construct
  REGION 1..7: note = Description of Artificial Sequence: Synthetic peptide
EVSNRPS

SEQ ID NO: 3848 - protein, 9 aa, synthetic construct
  REGION 1..9: note = Description of Artificial Sequence: Synthetic peptide
SSYTSTSVV

SEQ ID NO: 3849 - protein, 7 aa, synthetic construct
  REGION 1..7: note = Description of Artificial Sequence: Synthetic peptide
GGSISNY

SEQ ID NO: 3850 - protein, 5 aa, synthetic construct
  REGION 1..5: note = Description of Artificial Sequence: Synthetic peptide
YSSGI

SEQ ID NO: 3851 - protein, 9 aa, synthetic construct
  REGION 1..9: note = Description of Artificial Sequence: Synthetic peptide
IVGVKGAFA

SEQ ID NO: 3852 - protein, 10 aa, synthetic construct
  REGION 1..10: note = Description of Artificial Sequence: Synthetic peptide
TSSDVGGYNY

SEQ ID NO: 3853 - skipped

SEQ ID NO: 3854 - protein, 6 aa, synthetic construct
  REGION 1..6: note = Description of Artificial Sequence: Synthetic peptide
YTSTSV

SEQ ID NO: 3855 - protein, 10 aa, synthetic construct
  REGION 1..10: note = Description of Artificial Sequence: Synthetic peptide
GGSISNYYWS

SEQ ID NO: 3856 - protein, 9 aa, synthetic construct
  REGION 1..9: note = Description of Artificial Sequence: Synthetic peptide
RIYSSGITN

SEQ ID NO: 3857 - protein, 10 aa, synthetic construct
  REGION 1..10: note = Description of Artificial Sequence: Synthetic peptide
IVGVKGAFAI

SEQ ID NO: 3858 - protein, 14 aa, synthetic construct
  REGION 1..14: note = Description of Artificial Sequence: Synthetic peptide
TGTSSDVGGYNYVS

SEQ ID NO: 3859 - protein, 7 aa, synthetic construct
  REGION 1..7: note = Description of Artificial Sequence: Synthetic peptide
EVSNRPS

SEQ ID NO: 3860 - protein, 9 aa, synthetic construct
  REGION 1..9: note = Description of Artificial Sequence: Synthetic peptide
SSYTSTSVV

SEQ ID NO: 3861 - protein, 6 aa, synthetic construct
  REGION 1..6: note = Description of Artificial Sequence: Synthetic peptide
SNYYWS

SEQ ID NO: 3862 - protein, 12 aa, synthetic construct
  REGION 1..12: note = Description of Artificial Sequence: Synthetic peptide
WIGRIYSSGITN

SEQ ID NO: 3863 - protein, 11 aa, synthetic construct
  REGION 1..11: note = Description of Artificial Sequence: Synthetic peptide
AGIVGVKGAFA

SEQ ID NO: 3864 - protein, 10 aa, synthetic construct
  REGION 1..10: note = Description of Artificial Sequence: Synthetic peptide
VGGYNYVSWY

SEQ ID NO: 3865 - protein, 10 aa, synthetic construct
  REGION 1..10: note = Description of Artificial Sequence: Synthetic peptide
LMIYEVSNRP

SEQ ID NO: 3866 - protein, 8 aa, synthetic construct
  REGION 1..8: note = Description of Artificial Sequence: Synthetic peptide
SSYTSTSV

SEQ ID NO: 3867 - protein, 8 aa, synthetic construct
  REGION 1..8: note = Description of Artificial Sequence: Synthetic peptide
GGSISNYY

SEQ ID NO: 3868 - protein, 7 aa, synthetic construct
  REGION 1..7: note = Description of Artificial Sequence: Synthetic peptide
IYSSGIT

SEQ ID NO: 3869 - protein, 12 aa, synthetic construct
  REGION 1..12: note = Description of Artificial Sequence: Synthetic peptide
AGIVGVKGAFAI

SEQ ID NO: 3870 - protein, 9 aa, synthetic construct
  REGION 1..9: note = Description of Artificial Sequence: Synthetic peptide
SSDVGGYNY

SEQ ID NO: 3871 - skipped

SEQ ID NO: 3872 - protein, 9 aa, synthetic construct
  REGION 1..9: note = Description of Artificial Sequence: Synthetic peptide
SSYTSTSVV

SEQ ID NO: 3873 - protein, 118 aa, synthetic construct; identical to SEQ ID NO: 3635
  REGION 1..118: note = Description of Artificial Sequence: Synthetic polypeptide

SEQ ID NO: 3874 - protein, 109 aa, synthetic construct; identical to SEQ ID NO: 3568
  REGION 1..109: note = Description of Artificial Sequence: Synthetic polypeptide

SEQ ID NO: 3875 - protein, 448 aa, synthetic construct; identical to SEQ ID NO: 3637
  REGION 1..448: note = Description of Artificial Sequence: Synthetic polypeptide

SEQ ID NO: 3876 - protein, 215 aa, synthetic construct; identical to SEQ ID NO: 3570
  REGION 1..215: note = Description of Artificial Sequence: Synthetic polypeptide

SEQ ID NO: 3877 - protein, 5 aa, synthetic construct
  REGION 1..5: note = Description of Artificial Sequence: Synthetic peptide
NYYWS

SEQ ID NO: 3878 - protein, 16 aa, synthetic construct
  REGION 1..16: note = Description of Artificial Sequence: Synthetic peptide
RIYSSGITNYNPSLKS

SEQ ID NO: 3879 - protein, 10 aa, synthetic construct
  REGION 1..10: note = Description of Artificial Sequence: Synthetic peptide
IVGVKGAFAI

SEQ ID NO: 3880 - protein, 14 aa, synthetic construct
  REGION 1..14: note = Description of Artificial Sequence: Synthetic peptide
TGTSSDVGGYNYVS

SEQ ID NO: 3881 - protein, 7 aa, synthetic construct
  REGION 1..7: note = Description of Artificial Sequence: Synthetic peptide
EVSNRPS

SEQ ID NO: 3882 - protein, 9 aa, synthetic construct
  REGION 1..9: note = Description of Artificial Sequence: Synthetic peptide
SSYTSTSVV

SEQ ID NO: 3883 - protein, 7 aa, synthetic construct
  REGION 1..7: note = Description of Artificial Sequence: Synthetic peptide
GGSISNY

SEQ ID NO: 3884 - protein, 5 aa, synthetic construct
  REGION 1..5: note = Description of Artificial Sequence: Synthetic peptide
YSSGI

SEQ ID NO: 3885 - protein, 9 aa, synthetic construct
  REGION 1..9: note = Description of Artificial Sequence: Synthetic peptide
IVGVKGAFA

SEQ ID NO: 3886 - protein, 10 aa, synthetic construct
  REGION 1..10: note = Description of Artificial Sequence: Synthetic peptide
TSSDVGGYNY

SEQ ID NO: 3887 - skipped

SEQ ID NO: 3888 - protein, 6 aa, synthetic construct
  REGION 1..6: note = Description of Artificial Sequence: Synthetic peptide
YTSTSV

SEQ ID NO: 3889 - protein, 10 aa, synthetic construct
  REGION 1..10: note = Description of Artificial Sequence: Synthetic peptide
GGSISNYYWS

SEQ ID NO: 3890 - protein, 9 aa, synthetic construct
  REGION 1..9: note = Description of Artificial Sequence: Synthetic peptide
RIYSSGITN

SEQ ID NO: 3891 - protein, 10 aa, synthetic construct
  REGION 1..10: note = Description of Artificial Sequence: Synthetic peptide
IVGVKGAFAI

SEQ ID NO: 3892 - protein, 14 aa, synthetic construct
  REGION 1..14: note = Description of Artificial Sequence: Synthetic peptide
TGTSSDVGGYNYVS

SEQ ID NO: 3893 - protein, 7 aa, synthetic construct
  REGION 1..7: note = Description of Artificial Sequence: Synthetic peptide
EVSNRPS

SEQ ID NO: 3894 - protein, 9 aa, synthetic construct
  REGION 1..9: note = Description of Artificial Sequence: Synthetic peptide
SSYTSTSVV

SEQ ID NO: 3895 - protein, 6 aa, synthetic construct
  REGION 1..6: note = Description of Artificial Sequence: Synthetic peptide
SNYYWS

SEQ ID NO: 3896 - protein, 12 aa, synthetic construct
  REGION 1..12: note = Description of Artificial Sequence: Synthetic peptide
WIGRIYSSGITN

SEQ ID NO: 3897 - protein, 11 aa, synthetic construct
  REGION 1..11: note = Description of Artificial Sequence: Synthetic peptide
AGIVGVKGAFA

SEQ ID NO: 3898 - protein, 10 aa, synthetic construct
  REGION 1..10: note = Description of Artificial Sequence: Synthetic peptide
VGGYNYVSWY

SEQ ID NO: 3899 - protein, 10 aa, synthetic construct
  REGION 1..10: note = Description of Artificial Sequence: Synthetic peptide
LMIYEVSNRP

SEQ ID NO: 3900 - protein, 8 aa, synthetic construct
  REGION 1..8: note = Description of Artificial Sequence: Synthetic peptide
SSYTSTSV

SEQ ID NO: 3901 - protein, 8 aa, synthetic construct
  REGION 1..8: note = Description of Artificial Sequence: Synthetic peptide
GGSISNYY

SEQ ID NO: 3902 - protein, 7 aa, synthetic construct
  REGION 1..7: note = Description of Artificial Sequence: Synthetic peptide
IYSSGIT

SEQ ID NO: 3903 - protein, 12 aa, synthetic construct
  REGION 1..12: note = Description of Artificial Sequence: Synthetic peptide
AGIVGVKGAFAI

SEQ ID NO: 3904 - protein, 9 aa, synthetic construct
  REGION 1..9: note = Description of Artificial Sequence: Synthetic peptide
SSDVGGYNY

SEQ ID NO: 3905 - skipped

SEQ ID NO: 3906 - protein, 9 aa, synthetic construct
  REGION 1..9: note = Description of Artificial Sequence: Synthetic peptide
SSYTSTSVV

SEQ ID NO: 3907 - protein, 118 aa, synthetic construct; identical to SEQ ID NO: 3737
  REGION 1..118: note = Description of Artificial Sequence: Synthetic polypeptide

SEQ ID NO: 3908 - protein, 109 aa, synthetic construct; identical to SEQ ID NO: 3058
  REGION 1..109: note = Description of Artificial Sequence: Synthetic polypeptide

SEQ ID NO: 3909 - protein, 448 aa, synthetic construct; identical to SEQ ID NO: 3739
  REGION 1..448: note = Description of Artificial Sequence: Synthetic polypeptide

SEQ ID NO: 3910 - protein, 215 aa, synthetic construct; identical to SEQ ID NO: 3060
  REGION 1..215: note = Description of Artificial Sequence: Synthetic polypeptide

SEQ ID NO: 3911 - protein, 5 aa, synthetic construct
  REGION 1..5: note = Description of Artificial Sequence: Synthetic peptide
NYYWS

SEQ ID NO: 3912 - protein, 16 aa, synthetic construct
  REGION 1..16: note = Description of Artificial Sequence: Synthetic peptide
RIYSSGITNYNPSLKS

SEQ ID NO: 3913 - protein, 10 aa, synthetic construct
  REGION 1..10: note = Description of Artificial Sequence: Synthetic peptide
IVGVKGAFAI

SEQ ID NO: 3914 - protein, 14 aa, synthetic construct
  REGION 1..14: note = Description of Artificial Sequence: Synthetic peptide
TGTSSDVGGYNYVS

SEQ ID NO: 3915 - protein, 7 aa, synthetic construct
  REGION 1..7: note = Description of Artificial Sequence: Synthetic peptide
EVSNRPS

SEQ ID NO: 3916 - protein, 9 aa, synthetic construct
  REGION 1..9: note = Description of Artificial Sequence: Synthetic peptide
SSYTSTSVV

SEQ ID NO: 3917 - protein, 7 aa, synthetic construct
  REGION 1..7: note = Description of Artificial Sequence: Synthetic peptide
GGSISNY

SEQ ID NO: 3918 - protein, 5 aa, synthetic construct
  REGION 1..5: note = Description of Artificial Sequence: Synthetic peptide
YSSGI

SEQ ID NO: 3919 - protein, 9 aa, synthetic construct
  REGION 1..9: note = Description of Artificial Sequence: Synthetic peptide
IVGVKGAFA

SEQ ID NO: 3920 - protein, 10 aa, synthetic construct
  REGION 1..10: note = Description of Artificial Sequence: Synthetic peptide
TSSDVGGYNY

SEQ ID NO: 3921 - skipped

SEQ ID NO: 3922 - protein, 6 aa, synthetic construct
  REGION 1..6: note = Description of Artificial Sequence: Synthetic peptide
YTSTSV

SEQ ID NO: 3923 - protein, 10 aa, synthetic construct
  REGION 1..10: note = Description of Artificial Sequence: Synthetic peptide
GGSISNYYWS

SEQ ID NO: 3924 - protein, 9 aa, synthetic construct
  REGION 1..9: note = Description of Artificial Sequence: Synthetic peptide
RIYSSGITN

SEQ ID NO: 3925 - protein, 10 aa, synthetic construct
  REGION 1..10: note = Description of Artificial Sequence: Synthetic peptide
IVGVKGAFAI

SEQ ID NO: 3926 - protein, 14 aa, synthetic construct
  REGION 1..14: note = Description of Artificial Sequence: Synthetic peptide
TGTSSDVGGYNYVS

SEQ ID NO: 3927 - protein, 7 aa, synthetic construct
  REGION 1..7: note = Description of Artificial Sequence: Synthetic peptide
EVSNRPS

SEQ ID NO: 3928 - protein, 9 aa, synthetic construct
  REGION 1..9: note = Description of Artificial Sequence: Synthetic peptide
SSYTSTSVV

SEQ ID NO: 3929 - protein, 6 aa, synthetic construct
  REGION 1..6: note = Description of Artificial Sequence: Synthetic peptide
SNYYWS

SEQ ID NO: 3930 - protein, 12 aa, synthetic construct
  REGION 1..12: note = Description of Artificial Sequence: Synthetic peptide
WIGRIYSSGITN

SEQ ID NO: 3931 - protein, 11 aa, synthetic construct
  REGION 1..11: note = Description of Artificial Sequence: Synthetic peptide
AGIVGVKGAFA

SEQ ID NO: 3932 - protein, 10 aa, synthetic construct
  REGION 1..10: note = Description of Artificial Sequence: Synthetic peptide
VGGYNYVSWY

SEQ ID NO: 3933 - protein, 10 aa, synthetic construct
  REGION 1..10: note = Description of Artificial Sequence: Synthetic peptide
LMIYEVSNRP

SEQ ID NO: 3934 - protein, 8 aa, synthetic construct
  REGION 1..8: note = Description of Artificial Sequence: Synthetic peptide
SSYTSTSV

SEQ ID NO: 3935 - protein, 8 aa, synthetic construct
  REGION 1..8: note = Description of Artificial Sequence: Synthetic peptide
GGSISNYY

SEQ ID NO: 3936 - protein, 7 aa, synthetic construct
  REGION 1..7: note = Description of Artificial Sequence: Synthetic peptide
IYSSGIT

SEQ ID NO: 3937 - protein, 12 aa, synthetic construct
  REGION 1..12: note = Description of Artificial Sequence: Synthetic peptide
AGIVGVKGAFAI

SEQ ID NO: 3938 - protein, 9 aa, synthetic construct
  REGION 1..9: note = Description of Artificial Sequence: Synthetic peptide
SSDVGGYNY

SEQ ID NO: 3939 - skipped

SEQ ID NO: 3940 - protein, 9 aa, synthetic construct
  REGION 1..9: note = Description of Artificial Sequence: Synthetic peptide
SSYTSTSVV

SEQ ID NO: 3941 - protein, 118 aa, synthetic construct; identical to SEQ ID NO: 3329
  REGION 1..118: note = Description of Artificial Sequence: Synthetic polypeptide

SEQ ID NO: 3942 - protein, 109 aa, synthetic construct; identical to SEQ ID NO: 3058
  REGION 1..109: note = Description of Artificial Sequence: Synthetic polypeptide

SEQ ID NO: 3943 - protein, 448 aa, synthetic construct; identical to SEQ ID NO: 3331
  REGION 1..448: note = Description of Artificial Sequence: Synthetic polypeptide

SEQ ID NO: 3944 - protein, 215 aa, synthetic construct; identical to SEQ ID NO: 3060
  REGION 1..215: note = Description of Artificial Sequence: Synthetic polypeptide

SEQ ID NO: 3945 - protein, 5 aa, synthetic construct
  REGION 1..5: note = Description of Artificial Sequence: Synthetic peptide
NYYWS

SEQ ID NO: 3946 - protein, 16 aa, synthetic construct
  REGION 1..16: note = Description of Artificial Sequence: Synthetic peptide
RIYSSGITNYNPSLKS

SEQ ID NO: 3947 - protein, 10 aa, synthetic construct
  REGION 1..10: note = Description of Artificial Sequence: Synthetic peptide
IVGVKGAFAI

SEQ ID NO: 3948 - protein, 14 aa, synthetic construct
  REGION 1..14: note = Description of Artificial Sequence: Synthetic peptide
TGTSSDVGGYNYVS

SEQ ID NO: 3949 - protein, 7 aa, synthetic construct
  REGION 1..7: note = Description of Artificial Sequence: Synthetic peptide
EVSNRPS

SEQ ID NO: 3950 - protein, 9 aa, synthetic construct
  REGION 1..9: note = Description of Artificial Sequence: Synthetic peptide
SSYTSTSVV

SEQ ID NO: 3951 - protein, 7 aa, synthetic construct
  REGION 1..7: note = Description of Artificial Sequence: Synthetic peptide
GGSISNY

SEQ ID NO: 3952 - protein, 5 aa, synthetic construct
  REGION 1..5: note = Description of Artificial Sequence: Synthetic peptide
YSSGI

SEQ ID NO: 3953 - protein, 9 aa, synthetic construct
  REGION 1..9: note = Description of Artificial Sequence: Synthetic peptide
IVGVKGAFA

SEQ ID NO: 3954 - protein, 10 aa, synthetic construct
  REGION 1..10: note = Description of Artificial Sequence: Synthetic peptide
TSSDVGGYNY

SEQ ID NO: 3955 - skipped

SEQ ID NO: 3956 - protein, 6 aa, synthetic construct
  REGION 1..6: note = Description of Artificial Sequence: Synthetic peptide
YTSTSV

SEQ ID NO: 3957 - protein, 10 aa, synthetic construct
  REGION 1..10: note = Description of Artificial Sequence: Synthetic peptide
GGSISNYYWS

SEQ ID NO: 3958 - protein, 9 aa, synthetic construct
  REGION 1..9: note = Description of Artificial Sequence: Synthetic peptide
RIYSSGITN

SEQ ID NO: 3959 - protein, 10 aa, synthetic construct
  REGION 1..10: note = Description of Artificial Sequence: Synthetic peptide
IVGVKGAFAI

SEQ ID NO: 3960 - protein, 14 aa, synthetic construct
  REGION 1..14: note = Description of Artificial Sequence: Synthetic peptide
TGTSSDVGGYNYVS

SEQ ID NO: 3961 - protein, 7 aa, synthetic construct
  REGION 1..7: note = Description of Artificial Sequence: Synthetic peptide
EVSNRPS

SEQ ID NO: 3962 - protein, 9 aa, synthetic construct
  REGION 1..9: note = Description of Artificial Sequence: Synthetic peptide
SSYTSTSVV

SEQ ID NO: 3963 - protein, 6 aa, synthetic construct
  REGION 1..6: note = Description of Artificial Sequence: Synthetic peptide
SNYYWS

SEQ ID NO: 3964 - protein, 12 aa, synthetic construct
  REGION 1..12: note = Description of Artificial Sequence: Synthetic peptide
WIGRIYSSGITN

SEQ ID NO: 3965 - protein, 11 aa, synthetic construct
  REGION 1..11: note = Description of Artificial Sequence: Synthetic peptide
AGIVGVKGAFA

SEQ ID NO: 3966 - protein, 10 aa, synthetic construct
  REGION 1..10: note = Description of Artificial Sequence: Synthetic peptide
VGGYNYVSWY

SEQ ID NO: 3967 - protein, 10 aa, synthetic construct
  REGION 1..10: note = Description of Artificial Sequence: Synthetic peptide
LMIYEVSNRP

SEQ ID NO: 3968 - protein, 8 aa, synthetic construct
  REGION 1..8: note = Description of Artificial Sequence: Synthetic peptide
SSYTSTSV

SEQ ID NO: 3969 - protein, 8 aa, synthetic construct
  REGION 1..8: note = Description of Artificial Sequence: Synthetic peptide
GGSISNYY

SEQ ID NO: 3970 - protein, 7 aa, synthetic construct
  REGION 1..7: note = Description of Artificial Sequence: Synthetic peptide
IYSSGIT

SEQ ID NO: 3971 - protein, 12 aa, synthetic construct
  REGION 1..12: note = Description of Artificial Sequence: Synthetic peptide
AGIVGVKGAFAI

SEQ ID NO: 3972 - protein, 9 aa, synthetic construct
  REGION 1..9: note = Description of Artificial Sequence: Synthetic peptide
SSDVGGYNY

SEQ ID NO: 3973 - skipped

SEQ ID NO: 3974 - protein, 9 aa, synthetic construct
  REGION 1..9: note = Description of Artificial Sequence: Synthetic peptide
SSYTSTSVV

SEQ ID NO: 3975 - protein, 118 aa, synthetic construct; identical to SEQ ID NO: 3737
  REGION 1..118: note = Description of Artificial Sequence: Synthetic polypeptide

SEQ ID NO: 3976 - protein, 109 aa, synthetic construct
  REGION 1..109: note = Description of Artificial Sequence: Synthetic polypeptide
QLVLTQPASVSGSPGQSITISCTGTSSDVGGYNYVSWYQQHPGKAPKLMIYEVSNRPSGVSNRFSGSKSGNTASLTISGLQAEDEADYYCSSYTSTSVVFGGGTKLTVL

SEQ ID NO: 3977 - protein, 448 aa, synthetic construct; identical to SEQ ID NO: 3739
  REGION 1..448: note = Description of Artificial Sequence: Synthetic polypeptide

SEQ ID NO: 3978 - protein, 215 aa, synthetic construct
  REGION 1..215: note = Description of Artificial Sequence: Synthetic polypeptide
QLVLTQPASVSGSPGQSITISCTGTSSDVGGYNYVSWYQQHPGKAPKLMIYEVSNRPSGVSNRFSGSKSGNTASLTISGLQAEDEADYYCSSYTSTSVVFGGGTKLTVLGQPKAAPSVTLFPPSSEELQANKATLVCLISDFYPGAVTVAWKADSSPVKAGVETTTPSKQSNNKYAASSYLSLTPEQWKSHRSYSCQVTHEGSTVEKTVAPTECS

SEQ ID NO: 3979 - protein, 5 aa, synthetic construct
  REGION 1..5: note = Description of Artificial Sequence: Synthetic peptide
NHGMS

SEQ ID NO: 3980 - protein, 17 aa, synthetic construct
  REGION 1..17: note = Description of Artificial Sequence: Synthetic peptide
SITRGGDTTYYPDNVKG

SEQ ID NO: 3981 - protein, 11 aa, synthetic construct
  REGION 1..11: note = Description of Artificial Sequence: Synthetic peptide
GPLTVGYAMDY

SEQ ID NO: 3982 - protein, 14 aa, synthetic construct
  REGION 1..14: note = Description of Artificial Sequence: Synthetic peptide
TGTSSDVGGYNYVS

SEQ ID NO: 3983 - protein, 7 aa, synthetic construct
  REGION 1..7: note = Description of Artificial Sequence: Synthetic peptide
EVSKRPS

SEQ ID NO: 3984 - protein, 11 aa, synthetic construct
  REGION 1..11: note = Description of Artificial Sequence: Synthetic peptide
NSYAGSNNFEV

SEQ ID NO: 3985 - protein, 7 aa, synthetic construct
  REGION 1..7: note = Description of Artificial Sequence: Synthetic peptide
GFTFSNH

SEQ ID NO: 3986 - protein, 6 aa, synthetic construct
  REGION 1..6: note = Description of Artificial Sequence: Synthetic peptide
TRGGDT

SEQ ID NO: 3987 - protein, 10 aa, synthetic construct
  REGION 1..10: note = Description of Artificial Sequence: Synthetic peptide
GPLTVGYAMD

SEQ ID NO: 3988 - protein, 10 aa, synthetic construct
  REGION 1..10: note = Description of Artificial Sequence: Synthetic peptide
TSSDVGGYNY

SEQ ID NO: 3989 - skipped

SEQ ID NO: 3990 - protein, 8 aa, synthetic construct
  REGION 1..8: note = Description of Artificial Sequence: Synthetic peptide
YAGSNNFE

SEQ ID NO: 3991 - protein, 10 aa, synthetic construct
  REGION 1..10: note = Description of Artificial Sequence: Synthetic peptide
GFTFSNHGMS

SEQ ID NO: 3992 - protein, 10 aa, synthetic construct
  REGION 1..10: note = Description of Artificial Sequence: Synthetic peptide
SITRGGDTTY

SEQ ID NO: 3993 - protein, 11 aa, synthetic construct
  REGION 1..11: note = Description of Artificial Sequence: Synthetic peptide
GPLTVGYAMDY

SEQ ID NO: 3994 - protein, 14 aa, synthetic construct
  REGION 1..14: note = Description of Artificial Sequence: Synthetic peptide
TGTSSDVGGYNYVS

SEQ ID NO: 3995 - protein, 7 aa, synthetic construct
  REGION 1..7: note = Description of Artificial Sequence: Synthetic peptide
EVSKRPS

SEQ ID NO: 3996 - protein, 11 aa, synthetic construct
  REGION 1..11: note = Description of Artificial Sequence: Synthetic peptide
NSYAGSNNFEV

SEQ ID NO: 3997 - protein, 6 aa, synthetic construct
  REGION 1..6: note = Description of Artificial Sequence: Synthetic peptide
SNHGMS

SEQ ID NO: 3998 - protein, 13 aa, synthetic construct
  REGION 1..13: note = Description of Artificial Sequence: Synthetic peptide
WVASITRGGDTTY

SEQ ID NO: 3999 - protein, 12 aa, synthetic construct
  REGION 1..12: note = Description of Artificial Sequence: Synthetic peptide
TRGPLTVGYAMD

SEQ ID NO: 4000 - protein, 10 aa, synthetic construct
  REGION 1..10: note = Description of Artificial Sequence: Synthetic peptide
VGGYNYVSWY

SEQ ID NO: 4001 - protein, 10 aa, synthetic construct
  REGION 1..10: note = Description of Artificial Sequence: Synthetic peptide
LMIYEVSKRP

SEQ ID NO: 4002 - protein, 10 aa, synthetic construct
  REGION 1..10: note = Description of Artificial Sequence: Synthetic peptide
NSYAGSNNFE

SEQ ID NO: 4003 - protein, 8 aa, synthetic construct
  REGION 1..8: note = Description of Artificial Sequence: Synthetic peptide
GFTFSNHG

SEQ ID NO: 4004 - protein, 8 aa, synthetic construct
  REGION 1..8: note = Description of Artificial Sequence: Synthetic peptide
ITRGGDTT

SEQ ID NO: 4005 - protein, 13 aa, synthetic construct
  REGION 1..13: note = Description of Artificial Sequence: Synthetic peptide
TRGPLTVGYAMDY

SEQ ID NO: 4006 - protein, 9 aa, synthetic construct
  REGION 1..9: note = Description of Artificial Sequence: Synthetic peptide
SSDVGGYNY

SEQ ID NO: 4007 - skipped

SEQ ID NO: 4008 - protein, 11 aa, synthetic construct
  REGION 1..11: note = Description of Artificial Sequence: Synthetic peptide
NSYAGSNNFEV

SEQ ID NO: 4009 - protein, 120 aa, synthetic construct
  REGION 1..120: note = Description of Artificial Sequence: Synthetic polypeptide
EVQLVQSGGGLVKPGASLKLSCAASGFTFSNHGMSWVRQTSDKRLEWVASITRGGDTTYYPDNVKGRFTISRENAKNTLYLQMSSLKSDDTALYYCTRGPLTVGYAMDYWGQGTTVTVSS

SEQ ID NO: 4010 - protein, 111 aa, synthetic construct
  REGION 1..111: note = Description of Artificial Sequence: Synthetic polypeptide
QSVVTQPPSASGSPGQSVTISCTGTSSDVGGYNYVSWYQQHPGKAPKLMIYEVSKRPSGVPDRFSGSKSGNTASLTVSGLQAEDEADYYCNSYAGSNNFEVFGGGTKVTVL

SEQ ID NO: 4011 - protein, 450 aa, synthetic construct
  REGION 1..450: note = Description of Artificial Sequence: Synthetic polypeptide
EVQLVQSGGGLVKPGASLKLSCAASGFTFSNHGMSWVRQTSDKRLEWVASITRGGDTTYYPDNVKGRFTISRENAKNTLYLQMSSLKSDDTALYYCTRGPLTVGYAMDYWGQGTTVTVSSASTKGPSVFPLAPSSKSTSGGTAALGCLVKDYFPEPVTVSWNSGALTSGVHTFPAVLQSSGLYSLSSVVTVPSSSLGTQTYICNVNHKPSNTKVDKKVEPKSCDKTHTCPPCPAPELLGGPSVFLFPPKPKDTLMISRTPEVTCVVVDVSHEDPEVKFNWYVDGVEVHNAKTKPREEQYNSTYRVVSVLTVLHQDWLNGKEYKCKVSNKALPAPIEKTISKAKGQPREPQVYTLPPSREEMTKNQVSLTCLVKGFYPSDIAVEWESNGQPENNYKTTPPVLDSDGSFFLYSKLTVDKSRWQQGNVFSCSVMHEALHNHYTQKSLSLSPGK

SEQ ID NO: 4012 - protein, 217 aa, synthetic construct
  REGION 1..217: note = Description of Artificial Sequence: Synthetic polypeptide
QSVVTQPPSASGSPGQSVTISCTGTSSDVGGYNYVSWYQQHPGKAPKLMIYEVSKRPSGVPDRFSGSKSGNTASLTVSGLQAEDEADYYCNSYAGSNNFEVFGGGTKVTVLGQPKAAPSVTLFPPSSEELQANKATLVCLISDFYPGAVTVAWKADSSPVKAGVETTTPSKQSNNKYAASSYLSLTPEQWKSHRSYSCQVTHEGSTVEKTVAPTECS

SEQ ID NO: 4013 - protein, 5 aa, synthetic construct
  REGION 1..5: note = Description of Artificial Sequence: Synthetic peptide
NYYWS

SEQ ID NO: 4014 - protein, 16 aa, synthetic construct
  REGION 1..16: note = Description of Artificial Sequence: Synthetic peptide
RIYSSGITNYNPSLKS

SEQ ID NO: 4015 - protein, 10 aa, synthetic construct
  REGION 1..10: note = Description of Artificial Sequence: Synthetic peptide
IVGVKGAFAI

SEQ ID NO: 4016 - protein, 14 aa, synthetic construct
  REGION 1..14: note = Description of Artificial Sequence: Synthetic peptide
TGTSSDVGGYNYVS

SEQ ID NO: 4017 - protein, 7 aa, synthetic construct
  REGION 1..7: note = Description of Artificial Sequence: Synthetic peptide
EVSNRPS

SEQ ID NO: 4018 - protein, 9 aa, synthetic construct
  REGION 1..9: note = Description of Artificial Sequence: Synthetic peptide
SSYTSTSVV

SEQ ID NO: 4019 - protein, 7 aa, synthetic construct
  REGION 1..7: note = Description of Artificial Sequence: Synthetic peptide
GGSISNY

SEQ ID NO: 4020 - protein, 5 aa, synthetic construct
  REGION 1..5: note = Description of Artificial Sequence: Synthetic peptide
YSSGI

SEQ ID NO: 4021 - protein, 9 aa, synthetic construct
  REGION 1..9: note = Description of Artificial Sequence: Synthetic peptide
IVGVKGAFA

SEQ ID NO: 4022 - protein, 10 aa, synthetic construct
  REGION 1..10: note = Description of Artificial Sequence: Synthetic peptide
TSSDVGGYNY

SEQ ID NO: 4023 - skipped

SEQ ID NO: 4024 - protein, 6 aa, synthetic construct
  REGION 1..6: note = Description of Artificial Sequence: Synthetic peptide
YTSTSV

SEQ ID NO: 4025 - protein, 10 aa, synthetic construct
  REGION 1..10: note = Description of Artificial Sequence: Synthetic peptide
GGSISNYYWS

SEQ ID NO: 4026 - protein, 9 aa, synthetic construct
  REGION 1..9: note = Description of Artificial Sequence: Synthetic peptide
RIYSSGITN

SEQ ID NO: 4027 - protein, 10 aa, synthetic construct
  REGION 1..10: note = Description of Artificial Sequence: Synthetic peptide
IVGVKGAFAI

SEQ ID NO: 4028 - protein, 14 aa, synthetic construct
  REGION 1..14: note = Description of Artificial Sequence: Synthetic peptide
TGTSSDVGGYNYVS

SEQ ID NO: 4029 - protein, 7 aa, synthetic construct
  REGION 1..7: note = Description of Artificial Sequence: Synthetic peptide
EVSNRPS

SEQ ID NO: 4030 - protein, 9 aa, synthetic construct
  REGION 1..9: note = Description of Artificial Sequence: Synthetic peptide
SSYTSTSVV

SEQ ID NO: 4031 - protein, 6 aa, synthetic construct
  REGION 1..6: note = Description of Artificial Sequence: Synthetic peptide
SNYYWS

SEQ ID NO: 4032 - protein, 12 aa, synthetic construct
  REGION 1..12: note = Description of Artificial Sequence: Synthetic peptide
WIGRIYSSGITN

SEQ ID NO: 4033 - protein, 11 aa, synthetic construct
  REGION 1..11: note = Description of Artificial Sequence: Synthetic peptide
AGIVGVKGAFA

SEQ ID NO: 4034 - protein, 10 aa, synthetic construct
  REGION 1..10: note = Description of Artificial Sequence: Synthetic peptide
VGGYNYVSWY

SEQ ID NO: 4035 - protein, 10 aa, synthetic construct
  REGION 1..10: note = Description of Artificial Sequence: Synthetic peptide
LMIYEVSNRP

SEQ ID NO: 4036 - protein, 8 aa, synthetic construct
  REGION 1..8: note = Description of Artificial Sequence: Synthetic peptide
SSYTSTSV

SEQ ID NO: 4037 - protein, 8 aa, synthetic construct
  REGION 1..8: note = Description of Artificial Sequence: Synthetic peptide
GGSISNYY

SEQ ID NO: 4038 - protein, 7 aa, synthetic construct
  REGION 1..7: note = Description of Artificial Sequence: Synthetic peptide
IYSSGIT

SEQ ID NO: 4039 - protein, 12 aa, synthetic construct
  REGION 1..12: note = Description of Artificial Sequence: Synthetic peptide
AGIVGVKGAFAI

SEQ ID NO: 4040 - protein, 9 aa, synthetic construct
  REGION 1..9: note = Description of Artificial Sequence: Synthetic peptide
SSDVGGYNY

SEQ ID NO: 4041 - skipped

SEQ ID NO: 4042 - protein, 9 aa, synthetic construct
  REGION 1..9: note = Description of Artificial Sequence: Synthetic peptide
SSYTSTSVV

SEQ ID NO: 4043 - protein, 118 aa, synthetic construct; identical to SEQ ID NO: 3635
  REGION 1..118: note = Description of Artificial Sequence: Synthetic polypeptide

SEQ ID NO: 4044 - protein, 109 aa, synthetic construct; identical to SEQ ID NO: 3364
  REGION 1..109: note = Description of Artificial Sequence: Synthetic polypeptide

SEQ ID NO: 4045 - protein, 448 aa, synthetic construct; identical to SEQ ID NO: 3637
  REGION 1..448: note = Description of Artificial Sequence: Synthetic polypeptide

SEQ ID NO: 4046 - protein, 215 aa, synthetic construct; identical to SEQ ID NO: 3366
  REGION 1..215: note = Description of Artificial Sequence: Synthetic polypeptide

SEQ ID NO: 4047 - protein, 5 aa, synthetic construct
  REGION 1..5: note = Description of Artificial Sequence: Synthetic peptide
SYYWS

SEQ ID NO: 4048 - protein, 16 aa, synthetic construct
  REGION 1..16: note = Description of Artificial Sequence: Synthetic peptide
RIHTIGSINYNPSLKS

SEQ ID NO: 4049 - protein, 14 aa, synthetic construct
  REGION 1..14: note = Description of Artificial Sequence: Synthetic peptide
EGVGATNYYYGMAV

SEQ ID NO: 4050 - protein, 16 aa, synthetic construct
  REGION 1..16: note = Description of Artificial Sequence: Synthetic peptide
RSSQSLLHSNGYNYLD

SEQ ID NO: 4051 - protein, 7 aa, synthetic construct
  REGION 1..7: note = Description of Artificial Sequence: Synthetic peptide
LGSNRAS

SEQ ID NO: 4052 - protein, 9 aa, synthetic construct
  REGION 1..9: note = Description of Artificial Sequence: Synthetic peptide
MQALQTPYT

SEQ ID NO: 4053 - protein, 7 aa, synthetic construct
  REGION 1..7: note = Description of Artificial Sequence: Synthetic peptide
GGSISSY

SEQ ID NO: 4054 - protein, 5 aa, synthetic construct
  REGION 1..5: note = Description of Artificial Sequence: Synthetic peptide
HTIGS

SEQ ID NO: 4055 - protein, 13 aa, synthetic construct
  REGION 1..13: note = Description of Artificial Sequence: Synthetic peptide
EGVGATNYYYGMA

SEQ ID NO: 4056 - protein, 12 aa, synthetic construct
  REGION 1..12: note = Description of Artificial Sequence: Synthetic peptide
SQSLLHSNGYNY

SEQ ID NO: 4057 - skipped

SEQ ID NO: 4058 - protein, 6 aa, synthetic construct
  REGION 1..6: note = Description of Artificial Sequence: Synthetic peptide
ALQTPY

SEQ ID NO: 4059 - protein, 10 aa, synthetic construct
  REGION 1..10: note = Description of Artificial Sequence: Synthetic peptide
GGSISSYYWS

SEQ ID NO: 4060 - protein, 9 aa, synthetic construct
  REGION 1..9: note = Description of Artificial Sequence: Synthetic peptide
RIHTIGSIN

SEQ ID NO: 4061 - protein, 14 aa, synthetic construct
  REGION 1..14: note = Description of Artificial Sequence: Synthetic peptide
EGVGATNYYYGMAV

SEQ ID NO: 4062 - protein, 16 aa, synthetic construct
  REGION 1..16: note = Description of Artificial Sequence: Synthetic peptide
RSSQSLLHSNGYNYLD

SEQ ID NO: 4063 - protein, 7 aa, synthetic construct
  REGION 1..7: note = Description of Artificial Sequence: Synthetic peptide
LGSNRAS

SEQ ID NO: 4064 - protein, 9 aa, synthetic construct
  REGION 1..9: note = Description of Artificial Sequence: Synthetic peptide
MQALQTPYT

SEQ ID NO: 4065 - protein, 6 aa, synthetic construct
  REGION 1..6: note = Description of Artificial Sequence: Synthetic peptide
SSYYWS

SEQ ID NO: 4066 - protein, 12 aa, synthetic construct
  REGION 1..12: note = Description of Artificial Sequence: Synthetic peptide
WIGRIHTIGSIN

SEQ ID NO: 4067 - protein, 15 aa, synthetic construct
  REGION 1..15: note = Description of Artificial Sequence: Synthetic peptide
AMEGVGATNYYYGMA

SEQ ID NO: 4068 - protein, 12 aa, synthetic construct
  REGION 1..12: note = Description of Artificial Sequence: Synthetic peptide
LHSNGYNYLDWY

SEQ ID NO: 4069 - protein, 10 aa, synthetic construct
  REGION 1..10: note = Description of Artificial Sequence: Synthetic peptide
LLIYLGSNRA

SEQ ID NO: 4070 - protein, 8 aa, synthetic construct
  REGION 1..8: note = Description of Artificial Sequence: Synthetic peptide
MQALQTPY

SEQ ID NO: 4071 - protein, 8 aa, synthetic construct
  REGION 1..8: note = Description of Artificial Sequence: Synthetic peptide
GGSISSYY

SEQ ID NO: 4072 - protein, 7 aa, synthetic construct
  REGION 1..7: note = Description of Artificial Sequence: Synthetic peptide
IHTIGSI

SEQ ID NO: 4073 - protein, 16 aa, synthetic construct
  REGION 1..16: note = Description of Artificial Sequence: Synthetic peptide
AMEGVGATNYYYGMAV

SEQ ID NO: 4074 - protein, 11 aa, synthetic construct
  REGION 1..11: note = Description of Artificial Sequence: Synthetic peptide
QSLLHSNGYNY

SEQ ID NO: 4075 - skipped

SEQ ID NO: 4076 - protein, 9 aa, synthetic construct
  REGION 1..9: note = Description of Artificial Sequence: Synthetic peptide
MQALQTPYT

SEQ ID NO: 4077 - protein, 122 aa, synthetic construct
  REGION 1..122: note = Description of Artificial Sequence: Synthetic polypeptide
QVQLQESGPGLVKPSETLSLTCTVSGGSISSYYWSWIRQPAGKGLEWIGRIHTIGSINYNPSLKSRVTMSVDTSKNQFSLKLSSVTAADTAVYYCAMEGVGATNYYYGMAVWGRGTMVTVSS

SEQ ID NO: 4078 - protein, 112 aa, synthetic construct
  REGION 1..112: note = Description of Artificial Sequence: Synthetic polypeptide
DIQMTQSPLSLPVTPGEPASISCRSSQSLLHSNGYNYLDWYLQKPGQSPQLLIYLGSNRASGVPDRFSGSGSGTDFTLKISRVEAEDVGVYYCMQALQTPYTFGQGTKVEIK

SEQ ID NO: 4079 - protein, 452 aa, synthetic construct
  REGION 1..452: note = Description of Artificial Sequence: Synthetic polypeptide
QVQLQESGPGLVKPSETLSLTCTVSGGSISSYYWSWIRQPAGKGLEWIGRIHTIGSINYNPSLKSRVTMSVDTSKNQFSLKLSSVTAADTAVYYCAMEGVGATNYYYGMAVWGRGTMVTVSSASTKGPSVFPLAPSSKSTSGGTAALGCLVKDYFPEPVTVSWNSGALTSGVHTFPAVLQSSGLYSLSSVVTVPSSSLGTQTYICNVNHKPSNTKVDKKVEPKSCDKTHTCPPCPAPELLGGPSVFLFPPKPKDTLMISRTPEVTCVVVDVSHEDPEVKFNWYVDGVEVHNAKTKPREEQYNSTYRVVSVLTVLHQDWLNGKEYKCKVSNKALPAPIEKTISKAKGQPREPQVYTLPPSREEMTKNQVSLTCLVKGFYPSDIAVEWESNGQPENNYKTTPPVLDSDGSFFLYSKLTVDKSRWQQGNVFSCSVMHEALHNHYTQKSLSLSPGK

SEQ ID NO: 4080 - protein, 219 aa, synthetic construct
  REGION 1..219: note = Description of Artificial Sequence: Synthetic polypeptide
DIQMTQSPLSLPVTPGEPASISCRSSQSLLHSNGYNYLDWYLQKPGQSPQLLIYLGSNRASGVPDRFSGSGSGTDFTLKISRVEAEDVGVYYCMQALQTPYTFGQGTKVEIKRTVAAPSVFIFPPSDEQLKSGTASVVCLLNNFYPREAKVQWKVDNALQSGNSQESVTEQDSKDSTYSLSSTLTLSKADYEKHKVYACEVTHQGLSSPVTKSFNRGEC

SEQ ID NO: 4081 - protein, 5 aa, synthetic construct
  REGION 1..5: note = Description of Artificial Sequence: Synthetic peptide
TYWMH

SEQ ID NO: 4082 - protein, 17 aa, synthetic construct
  REGION 1..17: note = Description of Artificial Sequence: Synthetic peptide
LIDPSDSETRLNQKFKD

SEQ ID NO: 4083 - protein, 6 aa, synthetic construct
  REGION 1..6: note = Description of Artificial Sequence: Synthetic peptide
NRWLLG

SEQ ID NO: 4084 - protein, 16 aa, synthetic construct
  REGION 1..16: note = Description of Artificial Sequence: Synthetic peptide
RSSQSLVHSDGNTYLS

SEQ ID NO: 4085 - protein, 7 aa, synthetic construct
  REGION 1..7: note = Description of Artificial Sequence: Synthetic peptide
KISNRFS

SEQ ID NO: 4086 - protein, 9 aa, synthetic construct
  REGION 1..9: note = Description of Artificial Sequence: Synthetic peptide
VQTREFPLT

SEQ ID NO: 4087 - protein, 7 aa, synthetic construct
  REGION 1..7: note = Description of Artificial Sequence: Synthetic peptide
GYSFTTY

SEQ ID NO: 4088 - protein, 6 aa, synthetic construct
  REGION 1..6: note = Description of Artificial Sequence: Synthetic peptide
DPSDSE

SEQ ID NO: 4089 - protein, 5 aa, synthetic construct
  REGION 1..5: note = Description of Artificial Sequence: Synthetic peptide
NRWLL

SEQ ID NO: 4090 - protein, 12 aa, synthetic construct
  REGION 1..12: note = Description of Artificial Sequence: Synthetic peptide
SQSLVHSDGNTY

SEQ ID NO: 4091 - skipped

SEQ ID NO: 4092 - protein, 6 aa, synthetic construct
  REGION 1..6: note = Description of Artificial Sequence: Synthetic peptide
TREFPL

SEQ ID NO: 4093 - protein, 10 aa, synthetic construct
  REGION 1..10: note = Description of Artificial Sequence: Synthetic peptide
GYSFTTYWMH

SEQ ID NO: 4094 - protein, 10 aa, synthetic construct
  REGION 1..10: note = Description of Artificial Sequence: Synthetic peptide
LIDPSDSETR

SEQ ID NO: 4095 - protein, 6 aa, synthetic construct
  REGION 1..6: note = Description of Artificial Sequence: Synthetic peptide
NRWLLG

SEQ ID NO: 4096 - protein, 16 aa, synthetic construct
  REGION 1..16: note = Description of Artificial Sequence: Synthetic peptide
RSSQSLVHSDGNTYLS

SEQ ID NO: 4097 - protein, 7 aa, synthetic construct
  REGION 1..7: note = Description of Artificial Sequence: Synthetic peptide
KISNRFS

SEQ ID NO: 4098 - protein, 9 aa, synthetic construct
  REGION 1..9: note = Description of Artificial Sequence: Synthetic peptide
VQTREFPLT

SEQ ID NO: 4099 - protein, 6 aa, synthetic construct
  REGION 1..6: note = Description of Artificial Sequence: Synthetic peptide
TTYWMH

SEQ ID NO: 4100 - protein, 13 aa, synthetic construct
  REGION 1..13: note = Description of Artificial Sequence: Synthetic peptide
WIGLIDPSDSETR

SEQ ID NO: 4101 - protein, 7 aa, synthetic construct
  REGION 1..7: note = Description of Artificial Sequence: Synthetic peptide
ASNRWLL

SEQ ID NO: 4102 - protein, 12 aa, synthetic construct
  REGION 1..12: note = Description of Artificial Sequence: Synthetic peptide
VHSDGNTYLSWL

SEQ ID NO: 4103 - protein, 10 aa, synthetic construct
  REGION 1..10: note = Description of Artificial Sequence: Synthetic peptide
LLIYKISNRF

SEQ ID NO: 4104 - protein, 8 aa, synthetic construct
  REGION 1..8: note = Description of Artificial Sequence: Synthetic peptide
VQTREFPL

SEQ ID NO: 4105 - protein, 8 aa, synthetic construct
  REGION 1..8: note = Description of Artificial Sequence: Synthetic peptide
GYSFTTYW

SEQ ID NO: 4106 - protein, 8 aa, synthetic construct
  REGION 1..8: note = Description of Artificial Sequence: Synthetic peptide
IDPSDSET

SEQ ID NO: 4107 - protein, 8 aa, synthetic construct
  REGION 1..8: note = Description of Artificial Sequence: Synthetic peptide
ASNRWLLG

SEQ ID NO: 4108 - protein, 11 aa, synthetic construct
  REGION 1..11: note = Description of Artificial Sequence: Synthetic peptide
QSLVHSDGNTY

SEQ ID NO: 4109 - skipped

SEQ ID NO: 4110 - protein, 9 aa, synthetic construct
  REGION 1..9: note = Description of Artificial Sequence: Synthetic peptide
VQTREFPLT

SEQ ID NO: 4111 - protein, 115 aa, synthetic construct
  REGION 1..115: note = Description of Artificial Sequence: Synthetic polypeptide
QVQLQESGPQLVRPGASVKISCKASGYSFTTYWMHWVKQRPGQGLEWIGLIDPSDSETRLNQKFKDKATLTVDKSSSTAYMRLSSPTSEDSAVYYCASNRWLLGWGQGTMVTVSS

SEQ ID NO: 4112 - protein, 112 aa, synthetic construct
  REGION 1..112: note = Description of Artificial Sequence: Synthetic polypeptide
EIVLTQTPLSSPVTLGQPASISCRSSQSLVHSDGNTYLSWLHQRPGQPPRLLIYKISNRFSGVPDRFSGSGAGTDFTLKISRVETEDVGVYYCVQTREFPLTFGGGTKVEIK

SEQ ID NO: 4113 - protein, 445 aa, synthetic construct
  REGION 1..445: note = Description of Artificial Sequence: Synthetic polypeptide
QVQLQESGPQLVRPGASVKISCKASGYSFTTYWMHWVKQRPGQGLEWIGLIDPSDSETRLNQKFKDKATLTVDKSSSTAYMRLSSPTSEDSAVYYCASNRWLLGWGQGTMVTVSSASTKGPSVFPLAPSSKSTSGGTAALGCLVKDYFPEPVTVSWNSGALTSGVHTFPAVLQSSGLYSLSSVVTVPSSSLGTQTYICNVNHKPSNTKVDKKVEPKSCDKTHTCPPCPAPELLGGPSVFLFPPKPKDTLMISRTPEVTCVVVDVSHEDPEVKFNWYVDGVEVHNAKTKPREEQYNSTYRVVSVLTVLHQDWLNGKEYKCKVSNKALPAPIEKTISKAKGQPREPQVYTLPPSREEMTKNQVSLTCLVKGFYPSDIAVEWESNGQPENNYKTTPPVLDSDGSFFLYSKLTVDKSRWQQGNVFSCSVMHEALHNHYTQKSLSLSPGK

SEQ ID NO: 4114 - protein, 219 aa, synthetic construct
  REGION 1..219: note = Description of Artificial Sequence: Synthetic polypeptide
EIVLTQTPLSSPVTLGQPASISCRSSQSLVHSDGNTYLSWLHQRPGQPPRLLIYKISNRFSGVPDRFSGSGAGTDFTLKISRVETEDVGVYYCVQTREFPLTFGGGTKVEIKRTVAAPSVFIFPPSDEQLKSGTASVVCLLNNFYPREAKVQWKVDNALQSGNSQESVTEQDSKDSTYSLSSTLTLSKADYEKHKVYACEVTHQGLSSPVTKSFNRGEC

SEQ ID NO: 4115 - protein, 7 aa, synthetic construct
  REGION 1..7: note = Description of Artificial Sequence: Synthetic peptide
SNRAAWN

SEQ ID NO: 4116 - protein, 18 aa, synthetic construct
  REGION 1..18: note = Description of Artificial Sequence: Synthetic peptide
RTYYRSKWYNEYAASVKS

SEQ ID NO: 4117 - protein, 11 aa, synthetic construct
  REGION 1..11: note = Description of Artificial Sequence: Synthetic peptide
DLWELREACDI

SEQ ID NO: 4118 - protein, 11 aa, synthetic construct
  REGION 1..11: note = Description of Artificial Sequence: Synthetic peptide
RASQGISSYLA

SEQ ID NO: 4119 - protein, 7 aa, synthetic construct
  REGION 1..7: note = Description of Artificial Sequence: Synthetic peptide
VASTLQS

SEQ ID NO: 4120 - protein, 9 aa, synthetic construct
  REGION 1..9: note = Description of Artificial Sequence: Synthetic peptide
QQLNSYPFT

SEQ ID NO: 4121 - protein, 9 aa, synthetic construct
  REGION 1..9: note = Description of Artificial Sequence: Synthetic peptide
GDSVSSNRA

SEQ ID NO: 4122 - protein, 7 aa, synthetic construct
  REGION 1..7: note = Description of Artificial Sequence: Synthetic peptide
YYRSKWY

SEQ ID NO: 4123 - protein, 10 aa, synthetic construct
  REGION 1..10: note = Description of Artificial Sequence: Synthetic peptide
DLWELREACD

SEQ ID NO: 4124 - protein, 7 aa, synthetic construct
  REGION 1..7: note = Description of Artificial Sequence: Synthetic peptide
SQGISSY

SEQ ID NO: 4125 - skipped

SEQ ID NO: 4126 - protein, 6 aa, synthetic construct
  REGION 1..6: note = Description of Artificial Sequence: Synthetic peptide
LNSYPF

SEQ ID NO: 4127 - protein, 12 aa, synthetic construct
  REGION 1..12: note = Description of Artificial Sequence: Synthetic peptide
GDSVSSNRAAWN

SEQ ID NO: 4128 - protein, 11 aa, synthetic construct
  REGION 1..11: note = Description of Artificial Sequence: Synthetic peptide
RTYYRSKWYNE

SEQ ID NO: 4129 - protein, 11 aa, synthetic construct
  REGION 1..11: note = Description of Artificial Sequence: Synthetic peptide
DLWELREACDI

SEQ ID NO: 4130 - protein, 11 aa, synthetic construct
  REGION 1..11: note = Description of Artificial Sequence: Synthetic peptide
RASQGISSYLA

SEQ ID NO: 4131 - protein, 7 aa, synthetic construct
  REGION 1..7: note = Description of Artificial Sequence: Synthetic peptide
VASTLQS

SEQ ID NO: 4132 - protein, 9 aa, synthetic construct
  REGION 1..9: note = Description of Artificial Sequence: Synthetic peptide
QQLNSYPFT

SEQ ID NO: 4133 - protein, 8 aa, synthetic construct
  REGION 1..8: note = Description of Artificial Sequence: Synthetic peptide
SSNRAAWN

SEQ ID NO: 4134 - protein, 14 aa, synthetic construct
  REGION 1..14: note = Description of Artificial Sequence: Synthetic peptide
WLGRTYYRSKWYNE

SEQ ID NO: 4135 - protein, 12 aa, synthetic construct
  REGION 1..12: note = Description of Artificial Sequence: Synthetic peptide
ARDLWELREACD

SEQ ID NO: 4136 - protein, 7 aa, synthetic construct
  REGION 1..7: note = Description of Artificial Sequence: Synthetic peptide
SSYLAWY

SEQ ID NO: 4137 - protein, 10 aa, synthetic construct
  REGION 1..10: note = Description of Artificial Sequence: Synthetic peptide
LLIYVASTLQ

SEQ ID NO: 4138 - protein, 8 aa, synthetic construct
  REGION 1..8: note = Description of Artificial Sequence: Synthetic peptide
QQLNSYPF

SEQ ID NO: 4139 - protein, 10 aa, synthetic construct
  REGION 1..10: note = Description of Artificial Sequence: Synthetic peptide
GDSVSSNRAA

SEQ ID NO: 4140 - protein, 9 aa, synthetic construct
  REGION 1..9: note = Description of Artificial Sequence: Synthetic peptide
TYYRSKWYN

SEQ ID NO: 4141 - protein, 13 aa, synthetic construct
  REGION 1..13: note = Description of Artificial Sequence: Synthetic peptide
ARDLWELREACDI

SEQ ID NO: 4142 - protein, 6 aa, synthetic construct
  REGION 1..6: note = Description of Artificial Sequence: Synthetic peptide
QGISSY

SEQ ID NO: 4143 - skipped

SEQ ID NO: 4144 - protein, 9 aa, synthetic construct
  REGION 1..9: note = Description of Artificial Sequence: Synthetic peptide
QQLNSYPFT

SEQ ID NO: 4145 - protein, 123 aa, synthetic construct
  REGION 1..123: note = Description of Artificial Sequence: Synthetic polypeptide
QVQLQQSGPGLVKPSQTLSLTCAISGDSVSSNRAAWNWIRQSPSKGLEWLGRTYYRSKWYNEYAASVKSRMSINPDTSKNQFSLQLNSVTPEDTALYYCARDLWELREACDIWGQGTMVTVSS

SEQ ID NO: 4146 - protein, 107 aa, synthetic construct
  REGION 1..107: note = Description of Artificial Sequence: Synthetic polypeptide
DIVMTQSPSFLSTFVGDRVTITCRASQGISSYLAWYQQKPGKVPKLLIYVASTLQSGVPSRFSGSGSGTEFTLTISSLQPEDFATYYCQQLNSYPFTFGPGTKVDIK

SEQ ID NO: 4147 - protein, 453 aa, synthetic construct
  REGION 1..453: note = Description of Artificial Sequence: Synthetic polypeptide
QVQLQQSGPGLVKPSQTLSLTCAISGDSVSSNRAAWNWIRQSPSKGLEWLGRTYYRSKWYNEYAASVKSRMSINPDTSKNQFSLQLNSVTPEDTALYYCARDLWELREACDIWGQGTMVTVSSASTKGPSVFPLAPSSKSTSGGTAALGCLVKDYFPEPVTVSWNSGALTSGVHTFPAVLQSSGLYSLSSVVTVPSSSLGTQTYICNVNHKPSNTKVDKKVEPKSCDKTHTCPPCPAPELLGGPSVFLFPPKPKDTLMISRTPEVTCVVVDVSHEDPEVKFNWYVDGVEVHNAKTKPREEQYNSTYRVVSVLTVLHQDWLNGKEYKCKVSNKALPAPIEKTISKAKGQPREPQVYTLPPSREEMTKNQVSLTCLVKGFYPSDIAVEWESNGQPENNYKTTPPVLDSDGSFFLYSKLTVDKSRWQQGNVFSCSVMHEALHNHYTQKSLSLSPGK

SEQ ID NO: 4148 - protein, 214 aa, synthetic construct
  REGION 1..214: note = Description of Artificial Sequence: Synthetic polypeptide
DIVMTQSPSFLSTFVGDRVTITCRASQGISSYLAWYQQKPGKVPKLLIYVASTLQSGVPSRFSGSGSGTEFTLTISSLQPEDFATYYCQQLNSYPFTFGPGTKVDIKRTVAAPSVFIFPPSDEQLKSGTASVVCLLNNFYPREAKVQWKVDNALQSGNSQESVTEQDSKDSTYSLSSTLTLSKADYEKHKVYACEVTHQGLSSPVTKSFNRGEC

SEQ ID NO: 4149 - protein, 5 aa, synthetic construct
  REGION 1..5: note = Description of Artificial Sequence: Synthetic peptide
NYDMN

SEQ ID NO: 4150 - protein, 17 aa, synthetic construct
  REGION 1..17: note = Description of Artificial Sequence: Synthetic peptide
SISSSSSYIYYADSVKG

SEQ ID NO: 4151 - protein, 15 aa, synthetic construct
  REGION 1..15: note = Description of Artificial Sequence: Synthetic peptide
DVGVTTDYYYYGMDV

SEQ ID NO: 4152 - protein, 12 aa, synthetic construct
  REGION 1..12: note = Description of Artificial Sequence: Synthetic peptide
RASQSVASSYLA

SEQ ID NO: 4153 - protein, 7 aa, synthetic construct
  REGION 1..7: note = Description of Artificial Sequence: Synthetic peptide
GASSRAT

SEQ ID NO: 4154 - protein, 10 aa, synthetic construct
  REGION 1..10: note = Description of Artificial Sequence: Synthetic peptide
QQYGSSPPYT

SEQ ID NO: 4155 - protein, 7 aa, synthetic construct
  REGION 1..7: note = Description of Artificial Sequence: Synthetic peptide
GFTFSNY

SEQ ID NO: 4156 - protein, 6 aa, synthetic construct
  REGION 1..6: note = Description of Artificial Sequence: Synthetic peptide
SSSSSY

SEQ ID NO: 4157 - protein, 14 aa, synthetic construct
  REGION 1..14: note = Description of Artificial Sequence: Synthetic peptide
DVGVTTDYYYYGMD

SEQ ID NO: 4158 - protein, 8 aa, synthetic construct
  REGION 1..8: note = Description of Artificial Sequence: Synthetic peptide
SQSVASSY

SEQ ID NO: 4159 - skipped

SEQ ID NO: 4160 - protein, 7 aa, synthetic construct
  REGION 1..7: note = Description of Artificial Sequence: Synthetic peptide
YGSSPPY

SEQ ID NO: 4161 - protein, 10 aa, synthetic construct
  REGION 1..10: note = Description of Artificial Sequence: Synthetic peptide
GFTFSNYDMN

SEQ ID NO: 4162 - protein, 10 aa, synthetic construct
  REGION 1..10: note = Description of Artificial Sequence: Synthetic peptide
SISSSSSYIY

SEQ ID NO: 4163 - protein, 15 aa, synthetic construct
  REGION 1..15: note = Description of Artificial Sequence: Synthetic peptide
DVGVTTDYYYYGMDV

SEQ ID NO: 4164 - protein, 12 aa, synthetic construct
  REGION 1..12: note = Description of Artificial Sequence: Synthetic peptide
RASQSVASSYLA

SEQ ID NO: 4165 - protein, 7 aa, synthetic construct
  REGION 1..7: note = Description of Artificial Sequence: Synthetic peptide
GASSRAT

SEQ ID NO: 4166 - protein, 10 aa, synthetic construct
  REGION 1..10: note = Description of Artificial Sequence: Synthetic peptide
QQYGSSPPYT

SEQ ID NO: 4167 - protein, 6 aa, synthetic construct
  REGION 1..6: note = Description of Artificial Sequence: Synthetic peptide
SNYDMN

SEQ ID NO: 4168 - protein, 13 aa, synthetic construct
  REGION 1..13: note = Description of Artificial Sequence: Synthetic peptide
WVSSISSSSSYIY

SEQ ID NO: 4169 - protein, 16 aa, synthetic construct
  REGION 1..16: note = Description of Artificial Sequence: Synthetic peptide
ARDVGVTTDYYYYGMD

SEQ ID NO: 4170 - protein, 8 aa, synthetic construct
  REGION 1..8: note = Description of Artificial Sequence: Synthetic peptide
ASSYLAWY

SEQ ID NO: 4171 - protein, 10 aa, synthetic construct
  REGION 1..10: note = Description of Artificial Sequence: Synthetic peptide
LLIYGASSRA

SEQ ID NO: 4172 - protein, 9 aa, synthetic construct
  REGION 1..9: note = Description of Artificial Sequence: Synthetic peptide
QQYGSSPPY

SEQ ID NO: 4173 - protein, 8 aa, synthetic construct
  REGION 1..8: note = Description of Artificial Sequence: Synthetic peptide
GFTFSNYD

SEQ ID NO: 4174 - protein, 8 aa, synthetic construct
  REGION 1..8: note = Description of Artificial Sequence: Synthetic peptide
ISSSSSYI

SEQ ID NO: 4175 - protein, 17 aa, synthetic construct
  REGION 1..17: note = Description of Artificial Sequence: Synthetic peptide
ARDVGVTTDYYYYGMDV

SEQ ID NO: 4176 - protein, 7 aa, synthetic construct
  REGION 1..7: note = Description of Artificial Sequence: Synthetic peptide
QSVASSY

SEQ ID NO: 4177 - skipped

SEQ ID NO: 4178 - protein, 10 aa, synthetic construct
  REGION 1..10: note = Description of Artificial Sequence: Synthetic peptide
QQYGSSPPYT

SEQ ID NO: 4179 - protein, 124 aa, synthetic construct; identical to SEQ ID NO: 201
  REGION 1..124: note = Description of Artificial Sequence: Synthetic polypeptide

SEQ ID NO: 4180 - protein, 109 aa, synthetic construct
  REGION 1..109: note = Description of Artificial Sequence: Synthetic polypeptide
ETTLTQSPGTLSLSPGDRATLSCRASQSVASSYLAWYQQKPGQSPRLLIYGASSRATGIPDRFSGSGSGTDFTLTISRLEPEDFAVYYCQQYGSSPPYTFGQGTKVDIK

SEQ ID NO: 4181 - protein, 454 aa, synthetic construct; identical to SEQ ID NO: 203
  REGION 1..454: note = Description of Artificial Sequence: Synthetic polypeptide

SEQ ID NO: 4182 - protein, 216 aa, synthetic construct
  REGION 1..216: note = Description of Artificial Sequence: Synthetic polypeptide
ETTLTQSPGTLSLSPGDRATLSCRASQSVASSYLAWYQQKPGQSPRLLIYGASSRATGIPDRFSGSGSGTDFTLTISRLEPEDFAVYYCQQYGSSPPYTFGQGTKVDIKRTVAAPSVFIFPPSDEQLKSGTASVVCLLNNFYPREAKVQWKVDNALQSGNSQESVTEQDSKDSTYSLSSTLTLSKADYEKHKVYACEVTHQGLSSPVTKSFNRGEC

SEQ ID NO: 4183 - protein, 7 aa, synthetic construct
  REGION 1..7: note = Description of Artificial Sequence: Synthetic peptide
TIGVGVG

SEQ ID NO: 4184 - protein, 16 aa, synthetic construct
  REGION 1..16: note = Description of Artificial Sequence: Synthetic peptide
LIYWNDDKRYNPSLKS

SEQ ID NO: 4185 - protein, 10 aa, synthetic construct
  REGION 1..10: note = Description of Artificial Sequence: Synthetic peptide
SHDWVHAFDI

SEQ ID NO: 4186 - protein, 11 aa, synthetic construct
  REGION 1..11: note = Description of Artificial Sequence: Synthetic peptide
QASQDISHYLN

SEQ ID NO: 4187 - protein, 7 aa, synthetic construct
  REGION 1..7: note = Description of Artificial Sequence: Synthetic peptide
DASNLDT

SEQ ID NO: 4188 - protein, 9 aa, synthetic construct
  REGION 1..9: note = Description of Artificial Sequence: Synthetic peptide
QQYDNFPLT

SEQ ID NO: 4189 - protein, 9 aa, synthetic construct
  REGION 1..9: note = Description of Artificial Sequence: Synthetic peptide
GFSLSTIGV

SEQ ID NO: 4190 - protein, 5 aa, synthetic construct
  REGION 1..5: note = Description of Artificial Sequence: Synthetic peptide
YWNDD

SEQ ID NO: 4191 - protein, 9 aa, synthetic construct
  REGION 1..9: note = Description of Artificial Sequence: Synthetic peptide
SHDWVHAFD

SEQ ID NO: 4192 - protein, 7 aa, synthetic construct
  REGION 1..7: note = Description of Artificial Sequence: Synthetic peptide
SQDISHY

SEQ ID NO: 4193 - skipped

SEQ ID NO: 4194 - protein, 6 aa, synthetic construct
  REGION 1..6: note = Description of Artificial Sequence: Synthetic peptide
YDNFPL

SEQ ID NO: 4195 - protein, 12 aa, synthetic construct
  REGION 1..12: note = Description of Artificial Sequence: Synthetic peptide
GFSLSTIGVGVG

SEQ ID NO: 4196 - protein, 9 aa, synthetic construct
  REGION 1..9: note = Description of Artificial Sequence: Synthetic peptide
LIYWNDDKR

SEQ ID NO: 4197 - protein, 10 aa, synthetic construct
  REGION 1..10: note = Description of Artificial Sequence: Synthetic peptide
SHDWVHAFDI

SEQ ID NO: 4198 - protein, 11 aa, synthetic construct
  REGION 1..11: note = Description of Artificial Sequence: Synthetic peptide
QASQDISHYLN

SEQ ID NO: 4199 - protein, 7 aa, synthetic construct
  REGION 1..7: note = Description of Artificial Sequence: Synthetic peptide
DASNLDT

SEQ ID NO: 4200 - protein, 9 aa, synthetic construct
  REGION 1..9: note = Description of Artificial Sequence: Synthetic peptide
QQYDNFPLT

SEQ ID NO: 4201 - protein, 8 aa, synthetic construct
  REGION 1..8: note = Description of Artificial Sequence: Synthetic peptide
STIGVGVG

SEQ ID NO: 4202 - protein, 12 aa, synthetic construct
  REGION 1..12: note = Description of Artificial Sequence: Synthetic peptide
WLSLIYWNDDKR

SEQ ID NO: 4203 - protein, 11 aa, synthetic construct
  REGION 1..11: note = Description of Artificial Sequence: Synthetic peptide
AHSHDWVHAFD

SEQ ID NO: 4204 - protein, 7 aa, synthetic construct
  REGION 1..7: note = Description of Artificial Sequence: Synthetic peptide
SHYLNWY

SEQ ID NO: 4205 - protein, 10 aa, synthetic construct
  REGION 1..10: note = Description of Artificial Sequence: Synthetic peptide
FLIYDASNLD

SEQ ID NO: 4206 - protein, 8 aa, synthetic construct
  REGION 1..8: note = Description of Artificial Sequence: Synthetic peptide
QQYDNFPL

SEQ ID NO: 4207 - protein, 10 aa, synthetic construct
  REGION 1..10: note = Description of Artificial Sequence: Synthetic peptide
GFSLSTIGVG

SEQ ID NO: 4208 - protein, 7 aa, synthetic construct
  REGION 1..7: note = Description of Artificial Sequence: Synthetic peptide
IYWNDDK

SEQ ID NO: 4209 - protein, 12 aa, synthetic construct
  REGION 1..12: note = Description of Artificial Sequence: Synthetic peptide
AHSHDWVHAFDI

SEQ ID NO: 4210 - protein, 6 aa, synthetic construct
  REGION 1..6: note = Description of Artificial Sequence: Synthetic peptide
QDISHY

SEQ ID NO: 4211 - skipped

SEQ ID NO: 4212 - protein, 9 aa, synthetic construct
  REGION 1..9: note = Description of Artificial Sequence: Synthetic peptide
QQYDNFPLT

SEQ ID NO: 4213 - protein, 120 aa, synthetic construct
  REGION 1..120: note = Description of Artificial Sequence: Synthetic polypeptide
EVQLLESGPTLVKPTQTLTLTCTFSGFSLSTIGVGVGWIRQPPGKALEWLSLIYWNDDKRYNPSLKSRLTITKDTSKNQVVLTMTNMDPVDTATYYCAHSHDWVHAFDIWGQGTMVTVSS

SEQ ID NO: 4214 - protein, 107 aa, synthetic construct
  REGION 1..107: note = Description of Artificial Sequence: Synthetic polypeptide
DIVMTQSPSSLSASVGDRVTITCQASQDISHYLNWYQQKPGKAPKFLIYDASNLDTGVPSRFSGSGSGTDFTFTISSLQPEDIATYYCQQYDNFPLTFGGGTKVEIK

SEQ ID NO: 4215 - protein, 450 aa, synthetic construct
  REGION 1..450: note = Description of Artificial Sequence: Synthetic polypeptide
EVQLLESGPTLVKPTQTLTLTCTFSGFSLSTIGVGVGWIRQPPGKALEWLSLIYWNDDKRYNPSLKSRLTITKDTSKNQVVLTMTNMDPVDTATYYCAHSHDWVHAFDIWGQGTMVTVSSASTKGPSVFPLAPSSKSTSGGTAALGCLVKDYFPEPVTVSWNSGALTSGVHTFPAVLQSSGLYSLSSVVTVPSSSLGTQTYICNVNHKPSNTKVDKKVEPKSCDKTHTCPPCPAPELLGGPSVFLFPPKPKDTLMISRTPEVTCVVVDVSHEDPEVKFNWYVDGVEVHNAKTKPREEQYNSTYRVVSVLTVLHQDWLNGKEYKCKVSNKALPAPIEKTISKAKGQPREPQVYTLPPSREEMTKNQVSLTCLVKGFYPSDIAVEWESNGQPENNYKTTPPVLDSDGSFFLYSKLTVDKSRWQQGNVFSCSVMHEALHNHYTQKSLSLSPGK

SEQ ID NO: 4216 - protein, 214 aa, synthetic construct
  REGION 1..214: note = Description of Artificial Sequence: Synthetic polypeptide
DIVMTQSPSSLSASVGDRVTITCQASQDISHYLNWYQQKPGKAPKFLIYDASNLDTGVPSRFSGSGSGTDFTFTISSLQPEDIATYYCQQYDNFPLTFGGGTKVEIKRTVAAPSVFIFPPSDEQLKSGTASVVCLLNNFYPREAKVQWKVDNALQSGNSQESVTEQDSKDSTYSLSSTLTLSKADYEKHKVYACEVTHQGLSSPVTKSFNRGEC

SEQ ID NO: 4217 - protein, 5 aa, synthetic construct
  REGION 1..5: note = Description of Artificial Sequence: Synthetic peptide
GYYMH

SEQ ID NO: 4218 - protein, 17 aa, synthetic construct
  REGION 1..17: note = Description of Artificial Sequence: Synthetic peptide
WINPNSGATNKEQKFQG

SEQ ID NO: 4219 - protein, 7 aa, synthetic construct
  REGION 1..7: note = Description of Artificial Sequence: Synthetic peptide
EDDAFDV

SEQ ID NO: 4220 - protein, 11 aa, synthetic construct
  REGION 1..11: note = Description of Artificial Sequence: Synthetic peptide
QGDNLRNYYAT

SEQ ID NO: 4221 - protein, 7 aa, synthetic construct
  REGION 1..7: note = Description of Artificial Sequence: Synthetic peptide
GKNNRPS

SEQ ID NO: 4222 - protein, 11 aa, synthetic construct
  REGION 1..11: note = Description of Artificial Sequence: Synthetic peptide
NSRDSSGNHVV

SEQ ID NO: 4223 - protein, 7 aa, synthetic construct
  REGION 1..7: note = Description of Artificial Sequence: Synthetic peptide
GYTFTGY

SEQ ID NO: 4224 - protein, 6 aa, synthetic construct
  REGION 1..6: note = Description of Artificial Sequence: Synthetic peptide
NPNSGA

SEQ ID NO: 4225 - protein, 6 aa, synthetic construct
  REGION 1..6: note = Description of Artificial Sequence: Synthetic peptide
EDDAFD

SEQ ID NO: 4226 - protein, 7 aa, synthetic construct
  REGION 1..7: note = Description of Artificial Sequence: Synthetic peptide
DNLRNYY

SEQ ID NO: 4227 - skipped

SEQ ID NO: 4228 - protein, 8 aa, synthetic construct
  REGION 1..8: note = Description of Artificial Sequence: Synthetic peptide
RDSSGNHV

SEQ ID NO: 4229 - protein, 10 aa, synthetic construct
  REGION 1..10: note = Description of Artificial Sequence: Synthetic peptide
GYTFTGYYMH

SEQ ID NO: 4230 - protein, 10 aa, synthetic construct
  REGION 1..10: note = Description of Artificial Sequence: Synthetic peptide
WINPNSGATN

SEQ ID NO: 4231 - protein, 7 aa, synthetic construct
  REGION 1..7: note = Description of Artificial Sequence: Synthetic peptide
EDDAFDV

SEQ ID NO: 4232 - protein, 11 aa, synthetic construct
  REGION 1..11: note = Description of Artificial Sequence: Synthetic peptide
QGDNLRNYYAT

SEQ ID NO: 4233 - protein, 7 aa, synthetic construct
  REGION 1..7: note = Description of Artificial Sequence: Synthetic peptide
GKNNRPS

SEQ ID NO: 4234 - protein, 11 aa, synthetic construct
  REGION 1..11: note = Description of Artificial Sequence: Synthetic peptide
NSRDSSGNHVV

SEQ ID NO: 4235 - protein, 6 aa, synthetic construct
  REGION 1..6: note = Description of Artificial Sequence: Synthetic peptide
TGYYMH

SEQ ID NO: 4236 - protein, 13 aa, synthetic construct
  REGION 1..13: note = Description of Artificial Sequence: Synthetic peptide
WMGWINPNSGATN

SEQ ID NO: 4237 - protein, 8 aa, synthetic construct
  REGION 1..8: note = Description of Artificial Sequence: Synthetic peptide
AREDDAFD

SEQ ID NO: 4238 - protein, 7 aa, synthetic construct
  REGION 1..7: note = Description of Artificial Sequence: Synthetic peptide
NYYATWF

SEQ ID NO: 4239 - protein, 10 aa, synthetic construct
  REGION 1..10: note = Description of Artificial Sequence: Synthetic peptide
LVFFGKNNRP

SEQ ID NO: 4240 - protein, 10 aa, synthetic construct
  REGION 1..10: note = Description of Artificial Sequence: Synthetic peptide
NSRDSSGNHV

SEQ ID NO: 4241 - protein, 8 aa, synthetic construct
  REGION 1..8: note = Description of Artificial Sequence: Synthetic peptide
GYTFTGYY

SEQ ID NO: 4242 - protein, 8 aa, synthetic construct
  REGION 1..8: note = Description of Artificial Sequence: Synthetic peptide
INPNSGAT

SEQ ID NO: 4243 - protein, 9 aa, synthetic construct
  REGION 1..9: note = Description of Artificial Sequence: Synthetic peptide
AREDDAFDV

SEQ ID NO: 4244 - protein, 6 aa, synthetic construct
  REGION 1..6: note = Description of Artificial Sequence: Synthetic peptide
NLRNYY

SEQ ID NO: 4245 - skipped

SEQ ID NO: 4246 - protein, 11 aa, synthetic construct
  REGION 1..11: note = Description of Artificial Sequence: Synthetic peptide
NSRDSSGNHVV

SEQ ID NO: 4247 - protein, 116 aa, synthetic construct
  REGION 1..116: note = Description of Artificial Sequence: Synthetic polypeptide
QVQLVQSGAEVKKPGASVKVSCKASGYTFTGYYMHWMRQAPGQGLEWMGWINPNSGATNKEQKFQGRVTMTRDTSISTAYMELSRLRSDDTAVYYCAREDDAFDVWGQGTMVTVSS

SEQ ID NO: 4248 - protein, 108 aa, synthetic construct
  REGION 1..108: note = Description of Artificial Sequence: Synthetic polypeptide
SSELTQDPAVSVALGQTVRITCQGDNLRNYYATWFQQKPGQAPVLVFFGKNNRPSGIPDRFSGSSSGDTASLTITGAQAEDEADYYCNSRDSSGNHVVFGGGTKLTVL

SEQ ID NO: 4249 - protein, 446 aa, synthetic construct
  REGION 1..446: note = Description of Artificial Sequence: Synthetic polypeptide
QVQLVQSGAEVKKPGASVKVSCKASGYTFTGYYMHWMRQAPGQGLEWMGWINPNSGATNKEQKFQGRVTMTRDTSISTAYMELSRLRSDDTAVYYCAREDDAFDVWGQGTMVTVSSASTKGPSVFPLAPSSKSTSGGTAALGCLVKDYFPEPVTVSWNSGALTSGVHTFPAVLQSSGLYSLSSVVTVPSSSLGTQTYICNVNHKPSNTKVDKKVEPKSCDKTHTCPPCPAPELLGGPSVFLFPPKPKDTLMISRTPEVTCVVVDVSHEDPEVKFNWYVDGVEVHNAKTKPREEQYNSTYRVVSVLTVLHQDWLNGKEYKCKVSNKALPAPIEKTISKAKGQPREPQVYTLPPSREEMTKNQVSLTCLVKGFYPSDIAVEWESNGQPENNYKTTPPVLDSDGSFFLYSKLTVDKSRWQQGNVFSCSVMHEALHNHYTQKSLSLSPGK

SEQ ID NO: 4250 - protein, 214 aa, synthetic construct
  REGION 1..214: note = Description of Artificial Sequence: Synthetic polypeptide
SSELTQDPAVSVALGQTVRITCQGDNLRNYYATWFQQKPGQAPVLVFFGKNNRPSGIPDRFSGSSSGDTASLTITGAQAEDEADYYCNSRDSSGNHVVFGGGTKLTVLGQPKAAPSVTLFPPSSEELQANKATLVCLISDFYPGAVTVAWKADSSPVKAGVETTTPSKQSNNKYAASSYLSLTPEQWKSHRSYSCQVTHEGSTVEKTVAPTECS

SEQ ID NO: 4251 - protein, 5 aa, synthetic construct
  REGION 1..5: note = Description of Artificial Sequence: Synthetic peptide
NYGMN

SEQ ID NO: 4252 - protein, 17 aa, synthetic construct
  REGION 1..17: note = Description of Artificial Sequence: Synthetic peptide
YISSGSSYKYYADSMKG

SEQ ID NO: 4253 - protein, 14 aa, synthetic construct
  REGION 1..14: note = Description of Artificial Sequence: Synthetic peptide
DPVVTEYYYYGMDV

SEQ ID NO: 4254 - protein, 11 aa, synthetic construct
  REGION 1..11: note = Description of Artificial Sequence: Synthetic peptide
RASQGINSWLA

SEQ ID NO: 4255 - protein, 7 aa, synthetic construct
  REGION 1..7: note = Description of Artificial Sequence: Synthetic peptide
AASSLQS

SEQ ID NO: 4256 - protein, 9 aa, synthetic construct
  REGION 1..9: note = Description of Artificial Sequence: Synthetic peptide
QQANSFPWT

SEQ ID NO: 4257 - protein, 7 aa, synthetic construct
  REGION 1..7: note = Description of Artificial Sequence: Synthetic peptide
GFTFSNY

SEQ ID NO: 4258 - protein, 6 aa, synthetic construct
  REGION 1..6: note = Description of Artificial Sequence: Synthetic peptide
SSGSSY

SEQ ID NO: 4259 - protein, 13 aa, synthetic construct
  REGION 1..13: note = Description of Artificial Sequence: Synthetic peptide
DPVVTEYYYYGMD

SEQ ID NO: 4260 - protein, 7 aa, synthetic construct
  REGION 1..7: note = Description of Artificial Sequence: Synthetic peptide
SQGINSW

SEQ ID NO: 4261 - skipped

SEQ ID NO: 4262 - protein, 6 aa, synthetic construct
  REGION 1..6: note = Description of Artificial Sequence: Synthetic peptide
ANSFPW

SEQ ID NO: 4263 - protein, 10 aa, synthetic construct
  REGION 1..10: note = Description of Artificial Sequence: Synthetic peptide
GFTFSNYGMN

SEQ ID NO: 4264 - protein, 10 aa, synthetic construct
  REGION 1..10: note = Description of Artificial Sequence: Synthetic peptide
YISSGSSYKY

SEQ ID NO: 4265 - protein, 14 aa, synthetic construct
  REGION 1..14: note = Description of Artificial Sequence: Synthetic peptide
DPVVTEYYYYGMDV

SEQ ID NO: 4266 - protein, 11 aa, synthetic construct
  REGION 1..11: note = Description of Artificial Sequence: Synthetic peptide
RASQGINSWLA

SEQ ID NO: 4267 - protein, 7 aa, synthetic construct
  REGION 1..7: note = Description of Artificial Sequence: Synthetic peptide
AASSLQS

SEQ ID NO: 4268 - protein, 9 aa, synthetic construct
  REGION 1..9: note = Description of Artificial Sequence: Synthetic peptide
QQANSFPWT

SEQ ID NO: 4269 - protein, 6 aa, synthetic construct
  REGION 1..6: note = Description of Artificial Sequence: Synthetic peptide
SNYGMN

SEQ ID NO: 4270 - protein, 13 aa, synthetic construct
  REGION 1..13: note = Description of Artificial Sequence: Synthetic peptide
WVSYISSGSSYKY

SEQ ID NO: 4271 - protein, 15 aa, synthetic construct
  REGION 1..15: note = Description of Artificial Sequence: Synthetic peptide
ARDPVVTEYYYYGMD

SEQ ID NO: 4272 - protein, 7 aa, synthetic construct
  REGION 1..7: note = Description of Artificial Sequence: Synthetic peptide
NSWLAWY

SEQ ID NO: 4273 - protein, 10 aa, synthetic construct
  REGION 1..10: note = Description of Artificial Sequence: Synthetic peptide
LLIYAASSLQ

SEQ ID NO: 4274 - protein, 8 aa, synthetic construct
  REGION 1..8: note = Description of Artificial Sequence: Synthetic peptide
QQANSFPW

SEQ ID NO: 4275 - protein, 8 aa, synthetic construct
  REGION 1..8: note = Description of Artificial Sequence: Synthetic peptide
GFTFSNYG

SEQ ID NO: 4276 - protein, 8 aa, synthetic construct
  REGION 1..8: note = Description of Artificial Sequence: Synthetic peptide
ISSGSSYK

SEQ ID NO: 4277 - protein, 16 aa, synthetic construct
  REGION 1..16: note = Description of Artificial Sequence: Synthetic peptide
ARDPVVTEYYYYGMDV

SEQ ID NO: 4278 - protein, 6 aa, synthetic construct
  REGION 1..6: note = Description of Artificial Sequence: Synthetic peptide
QGINSW

SEQ ID NO: 4279 - skipped

SEQ ID NO: 4280 - protein, 9 aa, synthetic construct
  REGION 1..9: note = Description of Artificial Sequence: Synthetic peptide
QQANSFPWT

SEQ ID NO: 4281 - protein, 123 aa, synthetic construct; identical to SEQ ID NO: 915
  REGION 1..123: note = Description of Artificial Sequence: Synthetic polypeptide

SEQ ID NO: 4282 - protein, 107 aa, synthetic construct
  REGION 1..107: note = Description of Artificial Sequence: Synthetic polypeptide
DIQMTQSPSSVSASVGDRVTITCRASQGINSWLAWYQQKPGNAPKLLIYAASSLQSGVPSRFSGIGSGTDFIFTISSLQPEDFASYYCQQANSFPWTFGQGTKVEIK

SEQ ID NO: 4283 - protein, 453 aa, synthetic construct; identical to SEQ ID NO: 917
  REGION 1..453: note = Description of Artificial Sequence: Synthetic polypeptide

SEQ ID NO: 4284 - protein, 214 aa, synthetic construct
  REGION 1..214: note = Description of Artificial Sequence: Synthetic polypeptide
DIQMTQSPSSVSASVGDRVTITCRASQGINSWLAWYQQKPGNAPKLLIYAASSLQSGVPSRFSGIGSGTDFIFTISSLQPEDFASYYCQQANSFPWTFGQGTKVEIKRTVAAPSVFIFPPSDEQLKSGTASVVCLLNNFYPREAKVQWKVDNALQSGNSQESVTEQDSKDSTYSLSSTLTLSKADYEKHKVYACEVTHQGLSSPVTKSFNRGEC

SEQ ID NO: 4285 - protein, 5 aa, synthetic construct
  REGION 1..5: note = Description of Artificial Sequence: Synthetic peptide
SYSMI

SEQ ID NO: 4286 - protein, 17 aa, synthetic construct
  REGION 1..17: note = Description of Artificial Sequence: Synthetic peptide
SIGSSSTYIYYADSVRG

SEQ ID NO: 4287 - protein, 9 aa, synthetic construct
  REGION 1..9: note = Description of Artificial Sequence: Synthetic peptide
DGETGGFDY

SEQ ID NO: 4288 - protein, 12 aa, synthetic construct
  REGION 1..12: note = Description of Artificial Sequence: Synthetic peptide
RASQSISRSYLA

SEQ ID NO: 4289 - protein, 7 aa, synthetic construct
  REGION 1..7: note = Description of Artificial Sequence: Synthetic peptide
GPSNRAT

SEQ ID NO: 4290 - protein, 9 aa, synthetic construct
  REGION 1..9: note = Description of Artificial Sequence: Synthetic peptide
QQYGSLPLT

SEQ ID NO: 4291 - protein, 7 aa, synthetic construct
  REGION 1..7: note = Description of Artificial Sequence: Synthetic peptide
GFTFSSY

SEQ ID NO: 4292 - protein, 6 aa, synthetic construct
  REGION 1..6: note = Description of Artificial Sequence: Synthetic peptide
GSSSTY

SEQ ID NO: 4293 - protein, 8 aa, synthetic construct
  REGION 1..8: note = Description of Artificial Sequence: Synthetic peptide
DGETGGFD

SEQ ID NO: 4294 - protein, 8 aa, synthetic construct
  REGION 1..8: note = Description of Artificial Sequence: Synthetic peptide
SQSISRSY

SEQ ID NO: 4295 - skipped

SEQ ID NO: 4296 - protein, 6 aa, synthetic construct
  REGION 1..6: note = Description of Artificial Sequence: Synthetic peptide
YGSLPL

SEQ ID NO: 4297 - protein, 10 aa, synthetic construct
  REGION 1..10: note = Description of Artificial Sequence: Synthetic peptide
GFTFSSYSMI

SEQ ID NO: 4298 - protein, 10 aa, synthetic construct
  REGION 1..10: note = Description of Artificial Sequence: Synthetic peptide
SIGSSSTYIY

SEQ ID NO: 4299 - protein, 9 aa, synthetic construct
  REGION 1..9: note = Description of Artificial Sequence: Synthetic peptide
DGETGGFDY

SEQ ID NO: 4300 - protein, 12 aa, synthetic construct
  REGION 1..12: note = Description of Artificial Sequence: Synthetic peptide
RASQSISRSYLA

SEQ ID NO: 4301 - protein, 7 aa, synthetic construct
  REGION 1..7: note = Description of Artificial Sequence: Synthetic peptide
GPSNRAT

SEQ ID NO: 4302 - protein, 9 aa, synthetic construct
  REGION 1..9: note = Description of Artificial Sequence: Synthetic peptide
QQYGSLPLT

SEQ ID NO: 4303 - protein, 6 aa, synthetic construct
  REGION 1..6: note = Description of Artificial Sequence: Synthetic peptide
SSYSMI

SEQ ID NO: 4304 - protein, 13 aa, synthetic construct
  REGION 1..13: note = Description of Artificial Sequence: Synthetic peptide
WVSSIGSSSTYIY

SEQ ID NO: 4305 - protein, 10 aa, synthetic construct
  REGION 1..10: note = Description of Artificial Sequence: Synthetic peptide
ARDGETGGFD

SEQ ID NO: 4306 - protein, 8 aa, synthetic construct
  REGION 1..8: note = Description of Artificial Sequence: Synthetic peptide
SRSYLAWY

SEQ ID NO: 4307 - protein, 10 aa, synthetic construct
  REGION 1..10: note = Description of Artificial Sequence: Synthetic peptide
LLIYGPSNRA

SEQ ID NO: 4308 - protein, 8 aa, synthetic construct
  REGION 1..8: note = Description of Artificial Sequence: Synthetic peptide
QQYGSLPL

SEQ ID NO: 4309 - protein, 8 aa, synthetic construct
  REGION 1..8: note = Description of Artificial Sequence: Synthetic peptide
GFTFSSYS

SEQ ID NO: 4310 - protein, 8 aa, synthetic construct
  REGION 1..8: note = Description of Artificial Sequence: Synthetic peptide
IGSSSTYI

SEQ ID NO: 4311 - protein, 11 aa, synthetic construct
  REGION 1..11: note = Description of Artificial Sequence: Synthetic peptide
ARDGETGGFDY

SEQ ID NO: 4312 - protein, 7 aa, synthetic construct
  REGION 1..7: note = Description of Artificial Sequence: Synthetic peptide
QSISRSY

SEQ ID NO: 4313 - skipped

SEQ ID NO: 4314 - protein, 9 aa, synthetic construct
  REGION 1..9: note = Description of Artificial Sequence: Synthetic peptide
QQYGSLPLT

SEQ ID NO: 4315 - protein, 118 aa, synthetic construct
  REGION 1..118: note = Description of Artificial Sequence: Synthetic polypeptide
EVQLVESGGGLVKPGGSLRLSCAASGFTFSSYSMIWVRQAPGKGLEWVSSIGSSSTYIYYADSVRGRFTISRDNAKTSLYLQMNSLRAEDTAMYFCARDGETGGFDYWGQGILVTVSS

SEQ ID NO: 4316 - protein, 108 aa, synthetic construct
  REGION 1..108: note = Description of Artificial Sequence: Synthetic polypeptide
EIVMTQSPGTLSLSPGERATLSCRASQSISRSYLAWYQQKPGQPPRLLIYGPSNRATGIPDRFSASGSGTDFTLTNSRLEPEDFAVYYCQQYGSLPLTFGGGTKVEIK

SEQ ID NO: 4317 - protein, 448 aa, synthetic construct
  REGION 1..448: note = Description of Artificial Sequence: Synthetic polypeptide
EVQLVESGGGLVKPGGSLRLSCAASGFTFSSYSMIWVRQAPGKGLEWVSSIGSSSTYIYYADSVRGRFTISRDNAKTSLYLQMNSLRAEDTAMYFCARDGETGGFDYWGQGILVTVSSASTKGPSVFPLAPSSKSTSGGTAALGCLVKDYFPEPVTVSWNSGALTSGVHTFPAVLQSSGLYSLSSVVTVPSSSLGTQTYICNVNHKPSNTKVDKKVEPKSCDKTHTCPPCPAPELLGGPSVFLFPPKPKDTLMISRTPEVTCVVVDVSHEDPEVKFNWYVDGVEVHNAKTKPREEQYNSTYRVVSVLTVLHQDWLNGKEYKCKVSNKALPAPIEKTISKAKGQPREPQVYTLPPSREEMTKNQVSLTCLVKGFYPSDIAVEWESNGQPENNYKTTPPVLDSDGSFFLYSKLTVDKSRWQQGNVFSCSVMHEALHNHYTQKSLSLSPGK

SEQ ID NO: 4318 - protein, 215 aa, synthetic construct
  REGION 1..215: note = Description of Artificial Sequence: Synthetic polypeptide
EIVMTQSPGTLSLSPGERATLSCRASQSISRSYLAWYQQKPGQPPRLLIYGPSNRATGIPDRFSASGSGTDFTLTNSRLEPEDFAVYYCQQYGSLPLTFGGGTKVEIKRTVAAPSVFIFPPSDEQLKSGTASVVCLLNNFYPREAKVQWKVDNALQSGNSQESVTEQDSKDSTYSLSSTLTLSKADYEKHKVYACEVTHQGLSSPVTKSFNRGEC

SEQ ID NO: 4319 - protein, 5 aa, synthetic construct
  REGION 1..5: note = Description of Artificial Sequence: Synthetic peptide
SYDMN

SEQ ID NO: 4320 - protein, 17 aa, synthetic construct
  REGION 1..17: note = Description of Artificial Sequence: Synthetic peptide
YISSSSTAKYYADSVKG

SEQ ID NO: 4321 - protein, 12 aa, synthetic construct
  REGION 1..12: note = Description of Artificial Sequence: Synthetic peptide
EDIVVVTPILQH

SEQ ID NO: 4322 - protein, 11 aa, synthetic construct
  REGION 1..11: note = Description of Artificial Sequence: Synthetic peptide
RASQSVSKDLA

SEQ ID NO: 4323 - protein, 7 aa, synthetic construct
  REGION 1..7: note = Description of Artificial Sequence: Synthetic peptide
DASNRAT

SEQ ID NO: 4324 - protein, 10 aa, synthetic construct
  REGION 1..10: note = Description of Artificial Sequence: Synthetic peptide
QQRINWPLFT

SEQ ID NO: 4325 - protein, 7 aa, synthetic construct
  REGION 1..7: note = Description of Artificial Sequence: Synthetic peptide
GFTFSSY

SEQ ID NO: 4326 - protein, 6 aa, synthetic construct
  REGION 1..6: note = Description of Artificial Sequence: Synthetic peptide
SSSSTA

SEQ ID NO: 4327 - protein, 11 aa, synthetic construct
  REGION 1..11: note = Description of Artificial Sequence: Synthetic peptide
EDIVVVTPILQ

SEQ ID NO: 4328 - protein, 7 aa, synthetic construct
  REGION 1..7: note = Description of Artificial Sequence: Synthetic peptide
SQSVSKD

SEQ ID NO: 4329 - skipped

SEQ ID NO: 4330 - protein, 7 aa, synthetic construct
  REGION 1..7: note = Description of Artificial Sequence: Synthetic peptide
RINWPLF

SEQ ID NO: 4331 - protein, 10 aa, synthetic construct
  REGION 1..10: note = Description of Artificial Sequence: Synthetic peptide
GFTFSSYDMN

SEQ ID NO: 4332 - protein, 10 aa, synthetic construct
  REGION 1..10: note = Description of Artificial Sequence: Synthetic peptide
YISSSSTAKY

SEQ ID NO: 4333 - protein, 12 aa, synthetic construct
  REGION 1..12: note = Description of Artificial Sequence: Synthetic peptide
EDIVVVTPILQH

SEQ ID NO: 4334 - protein, 11 aa, synthetic construct
  REGION 1..11: note = Description of Artificial Sequence: Synthetic peptide
RASQSVSKDLA

SEQ ID NO: 4335 - protein, 7 aa, synthetic construct
  REGION 1..7: note = Description of Artificial Sequence: Synthetic peptide
DASNRAT

SEQ ID NO: 4336 - protein, 10 aa, synthetic construct
  REGION 1..10: note = Description of Artificial Sequence: Synthetic peptide
QQRINWPLFT

SEQ ID NO: 4337 - protein, 6 aa, synthetic construct
  REGION 1..6: note = Description of Artificial Sequence: Synthetic peptide
SSYDMN

SEQ ID NO: 4338 - protein, 13 aa, synthetic construct
  REGION 1..13: note = Description of Artificial Sequence: Synthetic peptide
WVSYISSSSTAKY

SEQ ID NO: 4339 - protein, 13 aa, synthetic construct
  REGION 1..13: note = Description of Artificial Sequence: Synthetic peptide
AREDIVVVTPILQ

SEQ ID NO: 4340 - protein, 7 aa, synthetic construct
  REGION 1..7: note = Description of Artificial Sequence: Synthetic peptide
SKDLAWY

SEQ ID NO: 4341 - protein, 10 aa, synthetic construct
  REGION 1..10: note = Description of Artificial Sequence: Synthetic peptide
LLIYDASNRA

SEQ ID NO: 4342 - protein, 9 aa, synthetic construct
  REGION 1..9: note = Description of Artificial Sequence: Synthetic peptide
QQRINWPLF

SEQ ID NO: 4343 - protein, 8 aa, synthetic construct
  REGION 1..8: note = Description of Artificial Sequence: Synthetic peptide
GFTFSSYD

SEQ ID NO: 4344 - protein, 8 aa, synthetic construct
  REGION 1..8: note = Description of Artificial Sequence: Synthetic peptide
ISSSSTAK

SEQ ID NO: 4345 - protein, 14 aa, synthetic construct
  REGION 1..14: note = Description of Artificial Sequence: Synthetic peptide
AREDIVVVTPILQH

SEQ ID NO: 4346 - protein, 6 aa, synthetic construct
  REGION 1..6: note = Description of Artificial Sequence: Synthetic peptide
QSVSKD

SEQ ID NO: 4347 - skipped

SEQ ID NO: 4348 - protein, 10 aa, synthetic construct
  REGION 1..10: note = Description of Artificial Sequence: Synthetic peptide
QQRINWPLFT

SEQ ID NO: 4349 - protein, 121 aa, synthetic construct
  REGION 1..121: note = Description of Artificial Sequence: Synthetic polypeptide
EVQLVESGGTLVQPGGSLRLSCAVSGFTFSSYDMNWVRQAPGKGLEWVSYISSSSTAKYYADSVKGRFTISRDNAKNSLYLQMNSLWDEDTAVYYCAREDIVVVTPILQHWGQGTTVTVSS

SEQ ID NO: 4350 - protein, 108 aa, synthetic construct
  REGION 1..108: note = Description of Artificial Sequence: Synthetic polypeptide
EIVMTQSPATLSLSPGERAILSCRASQSVSKDLAWYQQKPGQAPRLLIYDASNRATGIPARISGSGSGTDFTLTISSLEPEDFAVYYCQQRINWPLFTFGPGTKVEIK

SEQ ID NO: 4351 - protein, 451 aa, synthetic construct
  REGION 1..451: note = Description of Artificial Sequence: Synthetic polypeptide
EVQLVESGGTLVQPGGSLRLSCAVSGFTFSSYDMNWVRQAPGKGLEWVSYISSSSTAKYYADSVKGRFTISRDNAKNSLYLQMNSLWDEDTAVYYCAREDIVVVTPILQHWGQGTTVTVSSASTKGPSVFPLAPSSKSTSGGTAALGCLVKDYFPEPVTVSWNSGALTSGVHTFPAVLQSSGLYSLSSVVTVPSSSLGTQTYICNVNHKPSNTKVDKKVEPKSCDKTHTCPPCPAPELLGGPSVFLFPPKPKDTLMISRTPEVTCVVVDVSHEDPEVKFNWYVDGVEVHNAKTKPREEQYNSTYRVVSVLTVLHQDWLNGKEYKCKVSNKALPAPIEKTISKAKGQPREPQVYTLPPSREEMTKNQVSLTCLVKGFYPSDIAVEWESNGQPENNYKTTPPVLDSDGSFFLYSKLTVDKSRWQQGNVFSCSVMHEALHNHYTQKSLSLSPGK

SEQ ID NO: 4352 - protein, 215 aa, synthetic construct
  REGION 1..215: note = Description of Artificial Sequence: Synthetic polypeptide
EIVMTQSPATLSLSPGERAILSCRASQSVSKDLAWYQQKPGQAPRLLIYDASNRATGIPARISGSGSGTDFTLTISSLEPEDFAVYYCQQRINWPLFTFGPGTKVEIKRTVAAPSVFIFPPSDEQLKSGTASVVCLLNNFYPREAKVQWKVDNALQSGNSQESVTEQDSKDSTYSLSSTLTLSKADYEKHKVYACEVTHQGLSSPVTKSFNRGEC

SEQ ID NO: 4353 - protein, 7 aa, synthetic construct
  REGION 1..7: note = Description of Artificial Sequence: Synthetic peptide
SNSAAWN

SEQ ID NO: 4354 - protein, 18 aa, synthetic construct
  REGION 1..18: note = Description of Artificial Sequence: Synthetic peptide
GTYYRSKWFNNYAVSVKS

SEQ ID NO: 4355 - protein, 11 aa, synthetic construct
  REGION 1..11: note = Description of Artificial Sequence: Synthetic peptide
GEWGLRDAFDI

SEQ ID NO: 4356 - protein, 11 aa, synthetic construct
  REGION 1..11: note = Description of Artificial Sequence: Synthetic peptide
RASQGIHSYLA

SEQ ID NO: 4357 - protein, 7 aa, synthetic construct
  REGION 1..7: note = Description of Artificial Sequence: Synthetic peptide
VASTLQS

SEQ ID NO: 4358 - protein, 9 aa, synthetic construct
  REGION 1..9: note = Description of Artificial Sequence: Synthetic peptide
QQLNSYPWT

SEQ ID NO: 4359 - protein, 9 aa, synthetic construct
  REGION 1..9: note = Description of Artificial Sequence: Synthetic peptide
GDSVSSNSA

SEQ ID NO: 4360 - protein, 7 aa, synthetic construct
  REGION 1..7: note = Description of Artificial Sequence: Synthetic peptide
YYRSKWF

SEQ ID NO: 4361 - protein, 10 aa, synthetic construct
  REGION 1..10: note = Description of Artificial Sequence: Synthetic peptide
GEWGLRDAFD

SEQ ID NO: 4362 - protein, 7 aa, synthetic construct
  REGION 1..7: note = Description of Artificial Sequence: Synthetic peptide
SQGIHSY

SEQ ID NO: 4363 - skipped

SEQ ID NO: 4364 - protein, 6 aa, synthetic construct
  REGION 1..6: note = Description of Artificial Sequence: Synthetic peptide
LNSYPW

SEQ ID NO: 4365 - protein, 12 aa, synthetic construct
  REGION 1..12: note = Description of Artificial Sequence: Synthetic peptide
GDSVSSNSAAWN

SEQ ID NO: 4366 - protein, 11 aa, synthetic construct
  REGION 1..11: note = Description of Artificial Sequence: Synthetic peptide
GTYYRSKWFNN

SEQ ID NO: 4367 - protein, 11 aa, synthetic construct
  REGION 1..11: note = Description of Artificial Sequence: Synthetic peptide
GEWGLRDAFDI

SEQ ID NO: 4368 - protein, 11 aa, synthetic construct
  REGION 1..11: note = Description of Artificial Sequence: Synthetic peptide
RASQGIHSYLA

SEQ ID NO: 4369 - protein, 7 aa, synthetic construct
  REGION 1..7: note = Description of Artificial Sequence: Synthetic peptide
VASTLQS

SEQ ID NO: 4370 - protein, 9 aa, synthetic construct
  REGION 1..9: note = Description of Artificial Sequence: Synthetic peptide
QQLNSYPWT

SEQ ID NO: 4371 - protein, 8 aa, synthetic construct
  REGION 1..8: note = Description of Artificial Sequence: Synthetic peptide
SSNSAAWN

SEQ ID NO: 4372 - protein, 14 aa, synthetic construct
  REGION 1..14: note = Description of Artificial Sequence: Synthetic peptide
WLGGTYYRSKWFNN

SEQ ID NO: 4373 - protein, 12 aa, synthetic construct
  REGION 1..12: note = Description of Artificial Sequence: Synthetic peptide
ARGEWGLRDAFD

SEQ ID NO: 4374 - protein, 7 aa, synthetic construct
  REGION 1..7: note = Description of Artificial Sequence: Synthetic peptide
HSYLAWY

SEQ ID NO: 4375 - protein, 10 aa, synthetic construct
  REGION 1..10: note = Description of Artificial Sequence: Synthetic peptide
LLIYVASTLQ

SEQ ID NO: 4376 - protein, 8 aa, synthetic construct
  REGION 1..8: note = Description of Artificial Sequence: Synthetic peptide
QQLNSYPW

SEQ ID NO: 4377 - protein, 10 aa, synthetic construct
  REGION 1..10: note = Description of Artificial Sequence: Synthetic peptide
GDSVSSNSAA

SEQ ID NO: 4378 - protein, 9 aa, synthetic construct
  REGION 1..9: note = Description of Artificial Sequence: Synthetic peptide
TYYRSKWFN

SEQ ID NO: 4379 - protein, 13 aa, synthetic construct
  REGION 1..13: note = Description of Artificial Sequence: Synthetic peptide
ARGEWGLRDAFDI

SEQ ID NO: 4380 - protein, 6 aa, synthetic construct
  REGION 1..6: note = Description of Artificial Sequence: Synthetic peptide
QGIHSY

SEQ ID NO: 4381 - skipped

SEQ ID NO: 4382 - protein, 9 aa, synthetic construct
  REGION 1..9: note = Description of Artificial Sequence: Synthetic peptide
QQLNSYPWT

SEQ ID NO: 4383 - protein, 123 aa, synthetic construct
  REGION 1..123: note = Description of Artificial Sequence: Synthetic polypeptide
QVQLQQSGPGLVKPSQTLSLTCAISGDSVSSNSAAWNWIRQSPSRGLEWLGGTYYRSKWFNNYAVSVKSRITINPDTSTNQFSLQLNSVTPADTAVYYCARGEWGLRDAFDIWGQGTMVTVSS

SEQ ID NO: 4384 - protein, 107 aa, synthetic construct
  REGION 1..107: note = Description of Artificial Sequence: Synthetic polypeptide
DIQMTQSPSFLSASVGDRVIITCRASQGIHSYLAWYQQKPGKVPKLLIYVASTLQSGVPSRFSGSGSGTEFTLTISSLQPEDFATYYCQQLNSYPWTFGQGTKLEIK

SEQ ID NO: 4385 - protein, 453 aa, synthetic construct
  REGION 1..453: note = Description of Artificial Sequence: Synthetic polypeptide
QVQLQQSGPGLVKPSQTLSLTCAISGDSVSSNSAAWNWIRQSPSRGLEWLGGTYYRSKWFNNYAVSVKSRITINPDTSTNQFSLQLNSVTPADTAVYYCARGEWGLRDAFDIWGQGTMVTVSSASTKGPSVFPLAPSSKSTSGGTAALGCLVKDYFPEPVTVSWNSGALTSGVHTFPAVLQSSGLYSLSSVVTVPSSSLGTQTYICNVNHKPSNTKVDKKVEPKSCDKTHTCPPCPAPELLGGPSVFLFPPKPKDTLMISRTPEVTCVVVDVSHEDPEVKFNWYVDGVEVHNAKTKPREEQYNSTYRVVSVLTVLHQDWLNGKEYKCKVSNKALPAPIEKTISKAKGQPREPQVYTLPPSREEMTKNQVSLTCLVKGFYPSDIAVEWESNGQPENNYKTTPPVLDSDGSFFLYSKLTVDKSRWQQGNVFSCSVMHEALHNHYTQKSLSLSPGK

SEQ ID NO: 4386 - protein, 214 aa, synthetic construct
  REGION 1..214: note = Description of Artificial Sequence: Synthetic polypeptide
DIQMTQSPSFLSASVGDRVIITCRASQGIHSYLAWYQQKPGKVPKLLIYVASTLQSGVPSRFSGSGSGTEFTLTISSLQPEDFATYYCQQLNSYPWTFGQGTKLEIKRTVAAPSVFIFPPSDEQLKSGTASVVCLLNNFYPREAKVQWKVDNALQSGNSQESVTEQDSKDSTYSLSSTLTLSKADYEKHKVYACEVTHQGLSSPVTKSFNRGEC

SEQ ID NO: 4387 - protein, 5 aa, synthetic construct
  REGION 1..5: note = Description of Artificial Sequence: Synthetic peptide
SYDMN

SEQ ID NO: 4388 - protein, 17 aa, synthetic construct
  REGION 1..17: note = Description of Artificial Sequence: Synthetic peptide
SISSSSSYIYYADSVKG

SEQ ID NO: 4389 - protein, 16 aa, synthetic construct
  REGION 1..16: note = Description of Artificial Sequence: Synthetic peptide
DRGVGGTDYYYYGLDV

SEQ ID NO: 4390 - protein, 12 aa, synthetic construct
  REGION 1..12: note = Description of Artificial Sequence: Synthetic peptide
RASQSVSSSYLA

SEQ ID NO: 4391 - protein, 7 aa, synthetic construct
  REGION 1..7: note = Description of Artificial Sequence: Synthetic peptide
GASSRAT

SEQ ID NO: 4392 - protein, 10 aa, synthetic construct
  REGION 1..10: note = Description of Artificial Sequence: Synthetic peptide
QQYGSSPPYT

SEQ ID NO: 4393 - protein, 7 aa, synthetic construct
  REGION 1..7: note = Description of Artificial Sequence: Synthetic peptide
RFTLSSY

SEQ ID NO: 4394 - protein, 6 aa, synthetic construct
  REGION 1..6: note = Description of Artificial Sequence: Synthetic peptide
SSSSSY

SEQ ID NO: 4395 - protein, 15 aa, synthetic construct
  REGION 1..15: note = Description of Artificial Sequence: Synthetic peptide
DRGVGGTDYYYYGLD

SEQ ID NO: 4396 - protein, 8 aa, synthetic construct
  REGION 1..8: note = Description of Artificial Sequence: Synthetic peptide
SQSVSSSY

SEQ ID NO: 4397 - skipped

SEQ ID NO: 4398 - protein, 7 aa, synthetic construct
  REGION 1..7: note = Description of Artificial Sequence: Synthetic peptide
YGSSPPY

SEQ ID NO: 4399 - protein, 10 aa, synthetic construct
  REGION 1..10: note = Description of Artificial Sequence: Synthetic peptide
RFTLSSYDMN

SEQ ID NO: 4400 - protein, 10 aa, synthetic construct
  REGION 1..10: note = Description of Artificial Sequence: Synthetic peptide
SISSSSSYIY

SEQ ID NO: 4401 - protein, 16 aa, synthetic construct
  REGION 1..16: note = Description of Artificial Sequence: Synthetic peptide
DRGVGGTDYYYYGLDV

SEQ ID NO: 4402 - protein, 12 aa, synthetic construct
  REGION 1..12: note = Description of Artificial Sequence: Synthetic peptide
RASQSVSSSYLA

SEQ ID NO: 4403 - protein, 7 aa, synthetic construct
  REGION 1..7: note = Description of Artificial Sequence: Synthetic peptide
GASSRAT

SEQ ID NO: 4404 - protein, 10 aa, synthetic construct
  REGION 1..10: note = Description of Artificial Sequence: Synthetic peptide
QQYGSSPPYT

SEQ ID NO: 4405 - protein, 6 aa, synthetic construct
  REGION 1..6: note = Description of Artificial Sequence: Synthetic peptide
SSYDMN

SEQ ID NO: 4406 - protein, 13 aa, synthetic construct
  REGION 1..13: note = Description of Artificial Sequence: Synthetic peptide
WVSSISSSSSYIY

SEQ ID NO: 4407 - protein, 17 aa, synthetic construct
  REGION 1..17: note = Description of Artificial Sequence: Synthetic peptide
ARDRGVGGTDYYYYGLD

SEQ ID NO: 4408 - protein, 8 aa, synthetic construct
  REGION 1..8: note = Description of Artificial Sequence: Synthetic peptide
SSSYLAWY

SEQ ID NO: 4409 - protein, 10 aa, synthetic construct
  REGION 1..10: note = Description of Artificial Sequence: Synthetic peptide
LLIYGASSRA

SEQ ID NO: 4410 - protein, 9 aa, synthetic construct
  REGION 1..9: note = Description of Artificial Sequence: Synthetic peptide
QQYGSSPPY

SEQ ID NO: 4411 - protein, 8 aa, synthetic construct
  REGION 1..8: note = Description of Artificial Sequence: Synthetic peptide
RFTLSSYD

SEQ ID NO: 4412 - protein, 8 aa, synthetic construct
  REGION 1..8: note = Description of Artificial Sequence: Synthetic peptide
ISSSSSYI

SEQ ID NO: 4413 - protein, 18 aa, synthetic construct
  REGION 1..18: note = Description of Artificial Sequence: Synthetic peptide
ARDRGVGGTDYYYYGLDV

SEQ ID NO: 4414 - protein, 7 aa, synthetic construct
  REGION 1..7: note = Description of Artificial Sequence: Synthetic peptide
QSVSSSY

SEQ ID NO: 4415 - skipped

SEQ ID NO: 4416 - protein, 10 aa, synthetic construct
  REGION 1..10: note = Description of Artificial Sequence: Synthetic peptide
QQYGSSPPYT

SEQ ID NO: 4417 - protein, 125 aa, synthetic construct
  REGION 1..125: note = Description of Artificial Sequence: Synthetic polypeptide
EVQLLESGGGLVKPGGSLRLSCAASRFTLSSYDMNWVRQAPGKGLEWVSSISSSSSYIYYADSVKGRFTISRDNAKNSLYLQMNSLRAEDTAVYYCARDRGVGGTDYYYYGLDVWGQGTTVTVSS

SEQ ID NO: 4418 - protein, 109 aa, synthetic construct; identical to SEQ ID NO: 406
  REGION 1..109: note = Description of Artificial Sequence: Synthetic polypeptide

SEQ ID NO: 4419 - protein, 455 aa, synthetic construct
  REGION 1..455: note = Description of Artificial Sequence: Synthetic polypeptide
EVQLLESGGGLVKPGGSLRLSCAASRFTLSSYDMNWVRQAPGKGLEWVSSISSSSSYIYYADSVKGRFTISRDNAKNSLYLQMNSLRAEDTAVYYCARDRGVGGTDYYYYGLDVWGQGTTVTVSSASTKGPSVFPLAPSSKSTSGGTAALGCLVKDYFPEPVTVSWNSGALTSGVHTFPAVLQSSGLYSLSSVVTVPSSSLGTQTYICNVNHKPSNTKVDKKVEPKSCDKTHTCPPCPAPELLGGPSVFLFPPKPKDTLMISRTPEVTCVVVDVSHEDPEVKFNWYVDGVEVHNAKTKPREEQYNSTYRVVSVLTVLHQDWLNGKEYKCKVSNKALPAPIEKTISKAKGQPREPQVYTLPPSREEMTKNQVSLTCLVKGFYPSDIAVEWESNGQPENNYKTTPPVLDSDGSFFLYSKLTVDKSRWQQGNVFSCSVMHEALHNHYTQKSLSLSPGK

SEQ ID NO: 4420 - protein, 216 aa, synthetic construct; identical to SEQ ID NO: 408
  REGION 1..216: note = Description of Artificial Sequence: Synthetic polypeptide

SEQ ID NO: 4421 - protein, 5 aa, synthetic construct
  REGION 1..5: note = Description of Artificial Sequence: Synthetic peptide
GYYLQ

SEQ ID NO: 4422 - protein, 17 aa, synthetic construct
  REGION 1..17: note = Description of Artificial Sequence: Synthetic peptide
WINPNSGYTDYAQRFQD

SEQ ID NO: 4423 - protein, 7 aa, synthetic construct
  REGION 1..7: note = Description of Artificial Sequence: Synthetic peptide
LDDAFDV

SEQ ID NO: 4424 - protein, 11 aa, synthetic construct
  REGION 1..11: note = Description of Artificial Sequence: Synthetic peptide
QGDSLRNYYAI

SEQ ID NO: 4425 - protein, 7 aa, synthetic construct
  REGION 1..7: note = Description of Artificial Sequence: Synthetic peptide
GKNNRPS

SEQ ID NO: 4426 - protein, 11 aa, synthetic construct
  REGION 1..11: note = Description of Artificial Sequence: Synthetic peptide
NSRDSSGNHWV

SEQ ID NO: 4427 - protein, 7 aa, synthetic construct
  REGION 1..7: note = Description of Artificial Sequence: Synthetic peptide
GFTFTGY

SEQ ID NO: 4428 - protein, 6 aa, synthetic construct
  REGION 1..6: note = Description of Artificial Sequence: Synthetic peptide
NPNSGY

SEQ ID NO: 4429 - protein, 6 aa, synthetic construct
  REGION 1..6: note = Description of Artificial Sequence: Synthetic peptide
LDDAFD

SEQ ID NO: 4430 - protein, 7 aa, synthetic construct
  REGION 1..7: note = Description of Artificial Sequence: Synthetic peptide
DSLRNYY

SEQ ID NO: 4431 - skipped

SEQ ID NO: 4432 - protein, 8 aa, synthetic construct
  REGION 1..8: note = Description of Artificial Sequence: Synthetic peptide
RDSSGNHW

SEQ ID NO: 4433 - protein, 10 aa, synthetic construct
  REGION 1..10: note = Description of Artificial Sequence: Synthetic peptide
GFTFTGYYLQ

SEQ ID NO: 4434 - protein, 10 aa, synthetic construct
  REGION 1..10: note = Description of Artificial Sequence: Synthetic peptide
WINPNSGYTD

SEQ ID NO: 4435 - protein, 7 aa, synthetic construct
  REGION 1..7: note = Description of Artificial Sequence: Synthetic peptide
LDDAFDV

SEQ ID NO: 4436 - protein, 11 aa, synthetic construct
  REGION 1..11: note = Description of Artificial Sequence: Synthetic peptide
QGDSLRNYYAI

SEQ ID NO: 4437 - protein, 7 aa, synthetic construct
  REGION 1..7: note = Description of Artificial Sequence: Synthetic peptide
GKNNRPS

SEQ ID NO: 4438 - protein, 11 aa, synthetic construct
  REGION 1..11: note = Description of Artificial Sequence: Synthetic peptide
NSRDSSGNHWV

SEQ ID NO: 4439 - protein, 6 aa, synthetic construct
  REGION 1..6: note = Description of Artificial Sequence: Synthetic peptide
TGYYLQ

SEQ ID NO: 4440 - protein, 13 aa, synthetic construct
  REGION 1..13: note = Description of Artificial Sequence: Synthetic peptide
WMGWINPNSGYTD

SEQ ID NO: 4441 - protein, 8 aa, synthetic construct
  REGION 1..8: note = Description of Artificial Sequence: Synthetic peptide
ARLDDAFD

SEQ ID NO: 4442 - protein, 7 aa, synthetic construct
  REGION 1..7: note = Description of Artificial Sequence: Synthetic peptide
NYYAIWY

SEQ ID NO: 4443 - protein, 10 aa, synthetic construct
  REGION 1..10: note = Description of Artificial Sequence: Synthetic peptide
LVIFGKNNRP

SEQ ID NO: 4444 - protein, 10 aa, synthetic construct
  REGION 1..10: note = Description of Artificial Sequence: Synthetic peptide
NSRDSSGNHW

SEQ ID NO: 4445 - protein, 8 aa, synthetic construct
  REGION 1..8: note = Description of Artificial Sequence: Synthetic peptide
GFTFTGYY

SEQ ID NO: 4446 - protein, 8 aa, synthetic construct
  REGION 1..8: note = Description of Artificial Sequence: Synthetic peptide
INPNSGYT

SEQ ID NO: 4447 - protein, 9 aa, synthetic construct
  REGION 1..9: note = Description of Artificial Sequence: Synthetic peptide
ARLDDAFDV

SEQ ID NO: 4448 - protein, 6 aa, synthetic construct
  REGION 1..6: note = Description of Artificial Sequence: Synthetic peptide
SLRNYY

SEQ ID NO: 4449 - skipped

SEQ ID NO: 4450 - protein, 11 aa, synthetic construct
  REGION 1..11: note = Description of Artificial Sequence: Synthetic peptide
NSRDSSGNHWV

SEQ ID NO: 4451 - protein, 116 aa, synthetic construct
  REGION 1..116: note = Description of Artificial Sequence: Synthetic polypeptide
EVQLVESGAEVKKPGASVKVSCKASGFTFTGYYLQWVRQAPGQGLEWMGWINPNSGYTDYAQRFQDRVTMTRDTSINTAYMELSRLRSDDTAVYYCARLDDAFDVWGQGTMVTVSS

SEQ ID NO: 4452 - protein, 108 aa, synthetic construct
  REGION 1..108: note = Description of Artificial Sequence: Synthetic polypeptide
SYELTQDPAVSVALGQTVRITCQGDSLRNYYAIWYQQKPGQAPVLVIFGKNNRPSGIPDRFSGSSSGTTASLTITGTQAEDEADYYCNSRDSSGNHWVFGGGTKLTVL

SEQ ID NO: 4453 - protein, 446 aa, synthetic construct
  REGION 1..446: note = Description of Artificial Sequence: Synthetic polypeptide
EVQLVESGAEVKKPGASVKVSCKASGFTFTGYYLQWVRQAPGQGLEWMGWINPNSGYTDYAQRFQDRVTMTRDTSINTAYMELSRLRSDDTAVYYCARLDDAFDVWGQGTMVTVSSASTKGPSVFPLAPSSKSTSGGTAALGCLVKDYFPEPVTVSWNSGALTSGVHTFPAVLQSSGLYSLSSVVTVPSSSLGTQTYICNVNHKPSNTKVDKKVEPKSCDKTHTCPPCPAPELLGGPSVFLFPPKPKDTLMISRTPEVTCVVVDVSHEDPEVKFNWYVDGVEVHNAKTKPREEQYNSTYRVVSVLTVLHQDWLNGKEYKCKVSNKALPAPIEKTISKAKGQPREPQVYTLPPSREEMTKNQVSLTCLVKGFYPSDIAVEWESNGQPENNYKTTPPVLDSDGSFFLYSKLTVDKSRWQQGNVFSCSVMHEALHNHYTQKSLSLSPGK

SEQ ID NO: 4454 - protein, 214 aa, synthetic construct
  REGION 1..214: note = Description of Artificial Sequence: Synthetic polypeptide
SYELTQDPAVSVALGQTVRITCQGDSLRNYYAIWYQQKPGQAPVLVIFGKNNRPSGIPDRFSGSSSGTTASLTITGTQAEDEADYYCNSRDSSGNHWVFGGGTKLTVLGQPKAAPSVTLFPPSSEELQANKATLVCLISDFYPGAVTVAWKADSSPVKAGVETTTPSKQSNNKYAASSYLSLTPEQWKSHRSYSCQVTHEGSTVEKTVAPTECS

SEQ ID NO: 4455 - protein, 5 aa, synthetic construct
  REGION 1..5: note = Description of Artificial Sequence: Synthetic peptide
NYAIS

SEQ ID NO: 4456 - protein, 17 aa, synthetic construct
  REGION 1..17: note = Description of Artificial Sequence: Synthetic peptide
GIIPFFGTPDYAQKFQG

SEQ ID NO: 4457 - protein, 15 aa, synthetic construct
  REGION 1..15: note = Description of Artificial Sequence: Synthetic peptide
GGGYGDYDYYYGINV

SEQ ID NO: 4458 - protein, 16 aa, synthetic construct
  REGION 1..16: note = Description of Artificial Sequence: Synthetic peptide
RSSQSLVHSDGNTYLS

SEQ ID NO: 4459 - protein, 7 aa, synthetic construct
  REGION 1..7: note = Description of Artificial Sequence: Synthetic peptide
KISNRFS

SEQ ID NO: 4460 - protein, 9 aa, synthetic construct
  REGION 1..9: note = Description of Artificial Sequence: Synthetic peptide
MQAKEFPLT

SEQ ID NO: 4461 - protein, 7 aa, synthetic construct
  REGION 1..7: note = Description of Artificial Sequence: Synthetic peptide
GGSFSNY

SEQ ID NO: 4462 - protein, 6 aa, synthetic construct
  REGION 1..6: note = Description of Artificial Sequence: Synthetic peptide
IPFFGT

SEQ ID NO: 4463 - protein, 14 aa, synthetic construct
  REGION 1..14: note = Description of Artificial Sequence: Synthetic peptide
GGGYGDYDYYYGIN

SEQ ID NO: 4464 - protein, 12 aa, synthetic construct
  REGION 1..12: note = Description of Artificial Sequence: Synthetic peptide
SQSLVHSDGNTY

SEQ ID NO: 4465 - skipped

SEQ ID NO: 4466 - protein, 6 aa, synthetic construct
  REGION 1..6: note = Description of Artificial Sequence: Synthetic peptide
AKEFPL

SEQ ID NO: 4467 - protein, 10 aa, synthetic construct
  REGION 1..10: note = Description of Artificial Sequence: Synthetic peptide
GGSFSNYAIS

SEQ ID NO: 4468 - protein, 10 aa, synthetic construct
  REGION 1..10: note = Description of Artificial Sequence: Synthetic peptide
GIIPFFGTPD

SEQ ID NO: 4469 - protein, 15 aa, synthetic construct
  REGION 1..15: note = Description of Artificial Sequence: Synthetic peptide
GGGYGDYDYYYGINV

SEQ ID NO: 4470 - protein, 16 aa, synthetic construct
  REGION 1..16: note = Description of Artificial Sequence: Synthetic peptide
RSSQSLVHSDGNTYLS

SEQ ID NO: 4471 - protein, 7 aa, synthetic construct
  REGION 1..7: note = Description of Artificial Sequence: Synthetic peptide
KISNRFS

SEQ ID NO: 4472 - protein, 9 aa, synthetic construct
  REGION 1..9: note = Description of Artificial Sequence: Synthetic peptide
MQAKEFPLT

SEQ ID NO: 4473 - protein, 6 aa, synthetic construct
  REGION 1..6: note = Description of Artificial Sequence: Synthetic peptide
SNYAIS

SEQ ID NO: 4474 - protein, 13 aa, synthetic construct
  REGION 1..13: note = Description of Artificial Sequence: Synthetic peptide
WMGGIIPFFGTPD

SEQ ID NO: 4475 - protein, 16 aa, synthetic construct
  REGION 1..16: note = Description of Artificial Sequence: Synthetic peptide
STGGGYGDYDYYYGIN

SEQ ID NO: 4476 - protein, 12 aa, synthetic construct
  REGION 1..12: note = Description of Artificial Sequence: Synthetic peptide
VHSDGNTYLSWL

SEQ ID NO: 4477 - protein, 10 aa, synthetic construct
  REGION 1..10: note = Description of Artificial Sequence: Synthetic peptide
LLIYKISNRF

SEQ ID NO: 4478 - protein, 8 aa, synthetic construct
  REGION 1..8: note = Description of Artificial Sequence: Synthetic peptide
MQAKEFPL

SEQ ID NO: 4479 - protein, 8 aa, synthetic construct
  REGION 1..8: note = Description of Artificial Sequence: Synthetic peptide
GGSFSNYA

SEQ ID NO: 4480 - protein, 8 aa, synthetic construct
  REGION 1..8: note = Description of Artificial Sequence: Synthetic peptide
IIPFFGTP

SEQ ID NO: 4481 - protein, 17 aa, synthetic construct
  REGION 1..17: note = Description of Artificial Sequence: Synthetic peptide
STGGGYGDYDYYYGINV

SEQ ID NO: 4482 - protein, 11 aa, synthetic construct
  REGION 1..11: note = Description of Artificial Sequence: Synthetic peptide
QSLVHSDGNTY

SEQ ID NO: 4483 - skipped

SEQ ID NO: 4484 - protein, 9 aa, synthetic construct
  REGION 1..9: note = Description of Artificial Sequence: Synthetic peptide
MQAKEFPLT

SEQ ID NO: 4485 - protein, 124 aa, synthetic construct
  REGION 1..124: note = Description of Artificial Sequence: Synthetic polypeptide
QVQLVQSGAEVKKPGSSVKVSCKASGGSFSNYAISWMRQAPGQGLEWMGGIIPFFGTPDYAQKFQGRVTITADKSTSTAYMELSSLRSEDTAVYYCSTGGGYGDYDYYYGINVWGQGTMVTVSS

SEQ ID NO: 4486 - protein, 112 aa, synthetic construct
  REGION 1..112: note = Description of Artificial Sequence: Synthetic polypeptide
DIVMTQSPLSSPVDLGQPASISCRSSQSLVHSDGNTYLSWLQQRPGQPPRLLIYKISNRFSGVPDRFSGSGAGTDFTLKISRVEAEDVGVYYCMQAKEFPLTLGGGTKVDIK

SEQ ID NO: 4487 - protein, 454 aa, synthetic construct
  REGION 1..454: note = Description of Artificial Sequence: Synthetic polypeptide
QVQLVQSGAEVKKPGSSVKVSCKASGGSFSNYAISWMRQAPGQGLEWMGGIIPFFGTPDYAQKFQGRVTITADKSTSTAYMELSSLRSEDTAVYYCSTGGGYGDYDYYYGINVWGQGTMVTVSSASTKGPSVFPLAPSSKSTSGGTAALGCLVKDYFPEPVTVSWNSGALTSGVHTFPAVLQSSGLYSLSSVVTVPSSSLGTQTYICNVNHKPSNTKVDKKVEPKSCDKTHTCPPCPAPELLGGPSVFLFPPKPKDTLMISRTPEVTCVVVDVSHEDPEVKFNWYVDGVEVHNAKTKPREEQYNSTYRVVSVLTVLHQDWLNGKEYKCKVSNKALPAPIEKTISKAKGQPREPQVYTLPPSREEMTKNQVSLTCLVKGFYPSDIAVEWESNGQPENNYKTTPPVLDSDGSFFLYSKLTVDKSRWQQGNVFSCSVMHEALHNHYTQKSLSLSPGK

SEQ ID NO: 4488 - protein, 219 aa, synthetic construct
  REGION 1..219: note = Description of Artificial Sequence: Synthetic polypeptide
DIVMTQSPLSSPVDLGQPASISCRSSQSLVHSDGNTYLSWLQQRPGQPPRLLIYKISNRFSGVPDRFSGSGAGTDFTLKISRVEAEDVGVYYCMQAKEFPLTLGGGTKVDIKRTVAAPSVFIFPPSDEQLKSGTASVVCLLNNFYPREAKVQWKVDNALQSGNSQESVTEQDSKDSTYSLSSTLTLSKADYEKHKVYACEVTHQGLSSPVTKSFNRGEC

SEQ ID NO: 4489 - protein, 5 aa, synthetic construct
  REGION 1..5: note = Description of Artificial Sequence: Synthetic peptide
GDYIH

SEQ ID NO: 4490 - protein, 17 aa, synthetic construct
  REGION 1..17: note = Description of Artificial Sequence: Synthetic peptide
WINPNSGGTNYAQKFQG

SEQ ID NO: 4491 - protein, 14 aa, synthetic construct
  REGION 1..14: note = Description of Artificial Sequence: Synthetic peptide
EGGVAPAAPDAFDI

SEQ ID NO: 4492 - protein, 11 aa, synthetic construct
  REGION 1..11: note = Description of Artificial Sequence: Synthetic peptide
QGDSLRSYYAR

SEQ ID NO: 4493 - protein, 7 aa, synthetic construct
  REGION 1..7: note = Description of Artificial Sequence: Synthetic peptide
GKNNRPS

SEQ ID NO: 4494 - protein, 11 aa, synthetic construct
  REGION 1..11: note = Description of Artificial Sequence: Synthetic peptide
NSRDSSGNHRV

SEQ ID NO: 4495 - protein, 7 aa, synthetic construct
  REGION 1..7: note = Description of Artificial Sequence: Synthetic peptide
GYTFTGD

SEQ ID NO: 4496 - protein, 6 aa, synthetic construct
  REGION 1..6: note = Description of Artificial Sequence: Synthetic peptide
NPNSGG

SEQ ID NO: 4497 - protein, 13 aa, synthetic construct
  REGION 1..13: note = Description of Artificial Sequence: Synthetic peptide
EGGVAPAAPDAFD

SEQ ID NO: 4498 - protein, 7 aa, synthetic construct
  REGION 1..7: note = Description of Artificial Sequence: Synthetic peptide
DSLRSYY

SEQ ID NO: 4499 - skipped

SEQ ID NO: 4500 - protein, 8 aa, synthetic construct
  REGION 1..8: note = Description of Artificial Sequence: Synthetic peptide
RDSSGNHR

SEQ ID NO: 4501 - protein, 10 aa, synthetic construct
  REGION 1..10: note = Description of Artificial Sequence: Synthetic peptide
GYTFTGDYIH

SEQ ID NO: 4502 - protein, 10 aa, synthetic construct
  REGION 1..10: note = Description of Artificial Sequence: Synthetic peptide
WINPNSGGTN

SEQ ID NO: 4503 - protein, 14 aa, synthetic construct
  REGION 1..14: note = Description of Artificial Sequence: Synthetic peptide
EGGVAPAAPDAFDI

SEQ ID NO: 4504 - protein, 11 aa, synthetic construct
  REGION 1..11: note = Description of Artificial Sequence: Synthetic peptide
QGDSLRSYYAR

SEQ ID NO: 4505 - protein, 7 aa, synthetic construct
  REGION 1..7: note = Description of Artificial Sequence: Synthetic peptide
GKNNRPS

SEQ ID NO: 4506 - protein, 11 aa, synthetic construct
  REGION 1..11: note = Description of Artificial Sequence: Synthetic peptide
NSRDSSGNHRV

SEQ ID NO: 4507 - protein, 6 aa, synthetic construct
  REGION 1..6: note = Description of Artificial Sequence: Synthetic peptide
TGDYIH

SEQ ID NO: 4508 - protein, 13 aa, synthetic construct
  REGION 1..13: note = Description of Artificial Sequence: Synthetic peptide
WMGWINPNSGGTN

SEQ ID NO: 4509 - protein, 15 aa, synthetic construct
  REGION 1..15: note = Description of Artificial Sequence: Synthetic peptide
AREGGVAPAAPDAFD

SEQ ID NO: 4510 - protein, 7 aa, synthetic construct
  REGION 1..7: note = Description of Artificial Sequence: Synthetic peptide
SYYARWY

SEQ ID NO: 4511 - protein, 10 aa, synthetic construct
  REGION 1..10: note = Description of Artificial Sequence: Synthetic peptide
VVIYGKNNRP

SEQ ID NO: 4512 - protein, 10 aa, synthetic construct
  REGION 1..10: note = Description of Artificial Sequence: Synthetic peptide
NSRDSSGNHR

SEQ ID NO: 4513 - protein, 8 aa, synthetic construct
  REGION 1..8: note = Description of Artificial Sequence: Synthetic peptide
GYTFTGDY

SEQ ID NO: 4514 - protein, 8 aa, synthetic construct
  REGION 1..8: note = Description of Artificial Sequence: Synthetic peptide
INPNSGGT

SEQ ID NO: 4515 - protein, 16 aa, synthetic construct
  REGION 1..16: note = Description of Artificial Sequence: Synthetic peptide
AREGGVAPAAPDAFDI

SEQ ID NO: 4516 - protein, 6 aa, synthetic construct
  REGION 1..6: note = Description of Artificial Sequence: Synthetic peptide
SLRSYY

SEQ ID NO: 4517 - skipped

SEQ ID NO: 4518 - protein, 11 aa, synthetic construct
  REGION 1..11: note = Description of Artificial Sequence: Synthetic peptide
NSRDSSGNHRV

SEQ ID NO: 4519 - protein, 123 aa, synthetic construct
  REGION 1..123: note = Description of Artificial Sequence: Synthetic polypeptide
EVQLVQSGPEVKKPGASVKVSCKASGYTFTGDYIHWVRQVPGQGLEWMGWINPNSGGTNYAQKFQGRVTMTRDTSISTAFMELSRLRSDDTAVYYCAREGGVAPAAPDAFDIWGQGTMVTVSS

SEQ ID NO: 4520 - protein, 108 aa, synthetic construct
  REGION 1..108: note = Description of Artificial Sequence: Synthetic polypeptide
SSELTQDPAVSVALGQTVRITCQGDSLRSYYARWYQQKPGQAPVVVIYGKNNRPSGIPDRFSGSSSGNTASLTITGAQAEDEADYYCNSRDSSGNHRVFGGGTKLTVL

SEQ ID NO: 4521 - protein, 453 aa, synthetic construct
  REGION 1..453: note = Description of Artificial Sequence: Synthetic polypeptide
EVQLVQSGPEVKKPGASVKVSCKASGYTFTGDYIHWVRQVPGQGLEWMGWINPNSGGTNYAQKFQGRVTMTRDTSISTAFMELSRLRSDDTAVYYCAREGGVAPAAPDAFDIWGQGTMVTVSSASTKGPSVFPLAPSSKSTSGGTAALGCLVKDYFPEPVTVSWNSGALTSGVHTFPAVLQSSGLYSLSSVVTVPSSSLGTQTYICNVNHKPSNTKVDKKVEPKSCDKTHTCPPCPAPELLGGPSVFLFPPKPKDTLMISRTPEVTCVVVDVSHEDPEVKFNWYVDGVEVHNAKTKPREEQYNSTYRVVSVLTVLHQDWLNGKEYKCKVSNKALPAPIEKTISKAKGQPREPQVYTLPPSREEMTKNQVSLTCLVKGFYPSDIAVEWESNGQPENNYKTTPPVLDSDGSFFLYSKLTVDKSRWQQGNVFSCSVMHEALHNHYTQKSLSLSPGK

SEQ ID NO: 4522 - protein, 214 aa, synthetic construct
  REGION 1..214: note = Description of Artificial Sequence: Synthetic polypeptide
SSELTQDPAVSVALGQTVRITCQGDSLRSYYARWYQQKPGQAPVVVIYGKNNRPSGIPDRFSGSSSGNTASLTITGAQAEDEADYYCNSRDSSGNHRVFGGGTKLTVLGQPKAAPSVTLFPPSSEELQANKATLVCLISDFYPGAVTVAWKADSSPVKAGVETTTPSKQSNNKYAASSYLSLTPEQWKSHRSYSCQVTHEGSTVEKTVAPTECS

SEQ ID NO: 4523 - protein, 5 aa, synthetic construct
  REGION 1..5: note = Description of Artificial Sequence: Synthetic peptide
NYYWS

SEQ ID NO: 4524 - protein, 16 aa, synthetic construct
  REGION 1..16: note = Description of Artificial Sequence: Synthetic peptide
RIYSSGITNYNPSLKS

SEQ ID NO: 4525 - protein, 10 aa, synthetic construct
  REGION 1..10: note = Description of Artificial Sequence: Synthetic peptide
IVGVKGAFAI

SEQ ID NO: 4526 - protein, 14 aa, synthetic construct
  REGION 1..14: note = Description of Artificial Sequence: Synthetic peptide
TGTSSDVGGYNYVS

SEQ ID NO: 4527 - protein, 7 aa, synthetic construct
  REGION 1..7: note = Description of Artificial Sequence: Synthetic peptide
EVSNRPS

SEQ ID NO: 4528 - protein, 9 aa, synthetic construct
  REGION 1..9: note = Description of Artificial Sequence: Synthetic peptide
SSYTSTSVV

SEQ ID NO: 4529 - protein, 7 aa, synthetic construct
  REGION 1..7: note = Description of Artificial Sequence: Synthetic peptide
GGSISNY

SEQ ID NO: 4530 - protein, 5 aa, synthetic construct
  REGION 1..5: note = Description of Artificial Sequence: Synthetic peptide
YSSGI

SEQ ID NO: 4531 - protein, 9 aa, synthetic construct
  REGION 1..9: note = Description of Artificial Sequence: Synthetic peptide
IVGVKGAFA

SEQ ID NO: 4532 - protein, 10 aa, synthetic construct
  REGION 1..10: note = Description of Artificial Sequence: Synthetic peptide
TSSDVGGYNY

SEQ ID NO: 4533 - skipped

SEQ ID NO: 4534 - protein, 6 aa, synthetic construct
  REGION 1..6: note = Description of Artificial Sequence: Synthetic peptide
YTSTSV

SEQ ID NO: 4535 - protein, 10 aa, synthetic construct
  REGION 1..10: note = Description of Artificial Sequence: Synthetic peptide
GGSISNYYWS

SEQ ID NO: 4536 - protein, 9 aa, synthetic construct
  REGION 1..9: note = Description of Artificial Sequence: Synthetic peptide
RIYSSGITN

SEQ ID NO: 4537 - protein, 10 aa, synthetic construct
  REGION 1..10: note = Description of Artificial Sequence: Synthetic peptide
IVGVKGAFAI

SEQ ID NO: 4538 - protein, 14 aa, synthetic construct
  REGION 1..14: note = Description of Artificial Sequence: Synthetic peptide
TGTSSDVGGYNYVS

SEQ ID NO: 4539 - protein, 7 aa, synthetic construct
  REGION 1..7: note = Description of Artificial Sequence: Synthetic peptide
EVSNRPS

SEQ ID NO: 4540 - protein, 9 aa, synthetic construct
  REGION 1..9: note = Description of Artificial Sequence: Synthetic peptide
SSYTSTSVV

SEQ ID NO: 4541 - protein, 6 aa, synthetic construct
  REGION 1..6: note = Description of Artificial Sequence: Synthetic peptide
SNYYWS

SEQ ID NO: 4542 - protein, 12 aa, synthetic construct
  REGION 1..12: note = Description of Artificial Sequence: Synthetic peptide
WIGRIYSSGITN

SEQ ID NO: 4543 - protein, 11 aa, synthetic construct
  REGION 1..11: note = Description of Artificial Sequence: Synthetic peptide
AGIVGVKGAFA

SEQ ID NO: 4544 - protein, 10 aa, synthetic construct
  REGION 1..10: note = Description of Artificial Sequence: Synthetic peptide
VGGYNYVSWY

SEQ ID NO: 4545 - protein, 10 aa, synthetic construct
  REGION 1..10: note = Description of Artificial Sequence: Synthetic peptide
LMIYEVSNRP

SEQ ID NO: 4546 - protein, 8 aa, synthetic construct
  REGION 1..8: note = Description of Artificial Sequence: Synthetic peptide
SSYTSTSV

SEQ ID NO: 4547 - protein, 8 aa, synthetic construct
  REGION 1..8: note = Description of Artificial Sequence: Synthetic peptide
GGSISNYY

SEQ ID NO: 4548 - protein, 7 aa, synthetic construct
  REGION 1..7: note = Description of Artificial Sequence: Synthetic peptide
IYSSGIT

SEQ ID NO: 4549 - protein, 12 aa, synthetic construct
  REGION 1..12: note = Description of Artificial Sequence: Synthetic peptide
AGIVGVKGAFAI

SEQ ID NO: 4550 - protein, 9 aa, synthetic construct
  REGION 1..9: note = Description of Artificial Sequence: Synthetic peptide
SSDVGGYNY

SEQ ID NO: 4551 - skipped

SEQ ID NO: 4552 - protein, 9 aa, synthetic construct
  REGION 1..9: note = Description of Artificial Sequence: Synthetic peptide
SSYTSTSVV

SEQ ID NO: 4553 - protein, 118 aa, synthetic construct; identical to SEQ ID NO: 3329
  REGION 1..118: note = Description of Artificial Sequence: Synthetic polypeptide

SEQ ID NO: 4554 - protein, 109 aa, synthetic construct; identical to SEQ ID NO: 3636
  REGION 1..109: note = Description of Artificial Sequence: Synthetic polypeptide

SEQ ID NO: 4555 - protein, 448 aa, synthetic construct; identical to SEQ ID NO: 3331
  REGION 1..448: note = Description of Artificial Sequence: Synthetic polypeptide

SEQ ID NO: 4556 - protein, 215 aa, synthetic construct; identical to SEQ ID NO: 3638
  REGION 1..215: note = Description of Artificial Sequence: Synthetic polypeptide

SEQ ID NO: 4557 - protein, 5 aa, synthetic construct
  REGION 1..5: note = Description of Artificial Sequence: Synthetic peptide
GYYIH

SEQ ID NO: 4558 - protein, 17 aa, synthetic construct
  REGION 1..17: note = Description of Artificial Sequence: Synthetic peptide
WINPNSGYTNSAQKFQG

SEQ ID NO: 4559 - protein, 7 aa, synthetic construct
  REGION 1..7: note = Description of Artificial Sequence: Synthetic peptide
EDDAFDI

SEQ ID NO: 4560 - protein, 11 aa, synthetic construct
  REGION 1..11: note = Description of Artificial Sequence: Synthetic peptide
QGDSLRSYYAR

SEQ ID NO: 4561 - protein, 7 aa, synthetic construct
  REGION 1..7: note = Description of Artificial Sequence: Synthetic peptide
GKNNRPS

SEQ ID NO: 4562 - protein, 11 aa, synthetic construct
  REGION 1..11: note = Description of Artificial Sequence: Synthetic peptide
NSRDNSGNHVV

SEQ ID NO: 4563 - protein, 7 aa, synthetic construct
  REGION 1..7: note = Description of Artificial Sequence: Synthetic peptide
GYTFTGY

SEQ ID NO: 4564 - protein, 6 aa, synthetic construct
  REGION 1..6: note = Description of Artificial Sequence: Synthetic peptide
NPNSGY

SEQ ID NO: 4565 - protein, 6 aa, synthetic construct
  REGION 1..6: note = Description of Artificial Sequence: Synthetic peptide
EDDAFD

SEQ ID NO: 4566 - protein, 7 aa, synthetic construct
  REGION 1..7: note = Description of Artificial Sequence: Synthetic peptide
DSLRSYY

SEQ ID NO: 4567 - skipped

SEQ ID NO: 4568 - protein, 8 aa, synthetic construct
  REGION 1..8: note = Description of Artificial Sequence: Synthetic peptide
RDNSGNHV

SEQ ID NO: 4569 - protein, 10 aa, synthetic construct
  REGION 1..10: note = Description of Artificial Sequence: Synthetic peptide
GYTFTGYYIH

SEQ ID NO: 4570 - protein, 10 aa, synthetic construct
  REGION 1..10: note = Description of Artificial Sequence: Synthetic peptide
WINPNSGYTN

SEQ ID NO: 4571 - protein, 7 aa, synthetic construct
  REGION 1..7: note = Description of Artificial Sequence: Synthetic peptide
EDDAFDI

SEQ ID NO: 4572 - protein, 11 aa, synthetic construct
  REGION 1..11: note = Description of Artificial Sequence: Synthetic peptide
QGDSLRSYYAR

SEQ ID NO: 4573 - protein, 7 aa, synthetic construct
  REGION 1..7: note = Description of Artificial Sequence: Synthetic peptide
GKNNRPS

SEQ ID NO: 4574 - protein, 11 aa, synthetic construct
  REGION 1..11: note = Description of Artificial Sequence: Synthetic peptide
NSRDNSGNHVV

SEQ ID NO: 4575 - protein, 6 aa, synthetic construct
  REGION 1..6: note = Description of Artificial Sequence: Synthetic peptide
TGYYIH

SEQ ID NO: 4576 - protein, 13 aa, synthetic construct
  REGION 1..13: note = Description of Artificial Sequence: Synthetic peptide
WMGWINPNSGYTN

SEQ ID NO: 4577 - protein, 8 aa, synthetic construct
  REGION 1..8: note = Description of Artificial Sequence: Synthetic peptide
AREDDAFD

SEQ ID NO: 4578 - protein, 7 aa, synthetic construct
  REGION 1..7: note = Description of Artificial Sequence: Synthetic peptide
SYYARWY

SEQ ID NO: 4579 - protein, 10 aa, synthetic construct
  REGION 1..10: note = Description of Artificial Sequence: Synthetic peptide
LVIYGKNNRP

SEQ ID NO: 4580 - protein, 10 aa, synthetic construct
  REGION 1..10: note = Description of Artificial Sequence: Synthetic peptide
NSRDNSGNHV

SEQ ID NO: 4581 - protein, 8 aa, synthetic construct
  REGION 1..8: note = Description of Artificial Sequence: Synthetic peptide
GYTFTGYY

SEQ ID NO: 4582 - protein, 8 aa, synthetic construct
  REGION 1..8: note = Description of Artificial Sequence: Synthetic peptide
INPNSGYT

SEQ ID NO: 4583 - protein, 9 aa, synthetic construct
  REGION 1..9: note = Description of Artificial Sequence: Synthetic peptide
AREDDAFDI

SEQ ID NO: 4584 - protein, 6 aa, synthetic construct
  REGION 1..6: note = Description of Artificial Sequence: Synthetic peptide
SLRSYY

SEQ ID NO: 4585 - skipped

SEQ ID NO: 4586 - protein, 11 aa, synthetic construct
  REGION 1..11: note = Description of Artificial Sequence: Synthetic peptide
NSRDNSGNHVV

SEQ ID NO: 4587 - protein, 116 aa, synthetic construct
  REGION 1..116: note = Description of Artificial Sequence: Synthetic polypeptide
QVQLVQSGAEVKRPGASAKVSCKTSGYTFTGYYIHWVRQAPGQGLEWMGWINPNSGYTNSAQKFQGRVSMTRDTSISTVYMELSRLRSDDTAVYYCAREDDAFDIWGQGTLVTVSS

SEQ ID NO: 4588 - protein, 108 aa, synthetic construct
  REGION 1..108: note = Description of Artificial Sequence: Synthetic polypeptide
SSELTQDPAVSVALGQTVRITCQGDSLRSYYARWYQQKPGQAPVLVIYGKNNRPSGIPDRFSGSSSGDTASLTITGALAEDEADYYCNSRDNSGNHVVFGGGTKVTVL

SEQ ID NO: 4589 - protein, 446 aa, synthetic construct
  REGION 1..446: note = Description of Artificial Sequence: Synthetic polypeptide
QVQLVQSGAEVKRPGASAKVSCKTSGYTFTGYYIHWVRQAPGQGLEWMGWINPNSGYTNSAQKFQGRVSMTRDTSISTVYMELSRLRSDDTAVYYCAREDDAFDIWGQGTLVTVSSASTKGPSVFPLAPSSKSTSGGTAALGCLVKDYFPEPVTVSWNSGALTSGVHTFPAVLQSSGLYSLSSVVTVPSSSLGTQTYICNVNHKPSNTKVDKKVEPKSCDKTHTCPPCPAPELLGGPSVFLFPPKPKDTLMISRTPEVTCVVVDVSHEDPEVKFNWYVDGVEVHNAKTKPREEQYNSTYRVVSVLTVLHQDWLNGKEYKCKVSNKALPAPIEKTISKAKGQPREPQVYTLPPSREEMTKNQVSLTCLVKGFYPSDIAVEWESNGQPENNYKTTPPVLDSDGSFFLYSKLTVDKSRWQQGNVFSCSVMHEALHNHYTQKSLSLSPGK

SEQ ID NO: 4590 - protein, 214 aa, synthetic construct
  REGION 1..214: note = Description of Artificial Sequence: Synthetic polypeptide
SSELTQDPAVSVALGQTVRITCQGDSLRSYYARWYQQKPGQAPVLVIYGKNNRPSGIPDRFSGSSSGDTASLTITGALAEDEADYYCNSRDNSGNHVVFGGGTKVTVLGQPKAAPSVTLFPPSSEELQANKATLVCLISDFYPGAVTVAWKADSSPVKAGVETTTPSKQSNNKYAASSYLSLTPEQWKSHRSYSCQVTHEGSTVEKTVAPTECS

SEQ ID NO: 4591 - protein, 5 aa, synthetic construct
  REGION 1..5: note = Description of Artificial Sequence: Synthetic peptide
NYAIS

SEQ ID NO: 4592 - protein, 17 aa, synthetic construct
  REGION 1..17: note = Description of Artificial Sequence: Synthetic peptide
GIIPIFSAGTYAQRFQG

SEQ ID NO: 4593 - protein, 14 aa, synthetic construct
  REGION 1..14: note = Description of Artificial Sequence: Synthetic peptide
NSGTYYDYYYGMDV

SEQ ID NO: 4594 - protein, 16 aa, synthetic construct
  REGION 1..16: note = Description of Artificial Sequence: Synthetic peptide
RSSQSLVHSDGNTYLS

SEQ ID NO: 4595 - protein, 7 aa, synthetic construct
  REGION 1..7: note = Description of Artificial Sequence: Synthetic peptide
KIFNRLS

SEQ ID NO: 4596 - protein, 9 aa, synthetic construct
  REGION 1..9: note = Description of Artificial Sequence: Synthetic peptide
MQAKQFPLT

SEQ ID NO: 4597 - protein, 7 aa, synthetic construct
  REGION 1..7: note = Description of Artificial Sequence: Synthetic peptide
GGTFSNY

SEQ ID NO: 4598 - protein, 6 aa, synthetic construct
  REGION 1..6: note = Description of Artificial Sequence: Synthetic peptide
IPIFSA

SEQ ID NO: 4599 - protein, 13 aa, synthetic construct
  REGION 1..13: note = Description of Artificial Sequence: Synthetic peptide
NSGTYYDYYYGMD

SEQ ID NO: 4600 - protein, 12 aa, synthetic construct
  REGION 1..12: note = Description of Artificial Sequence: Synthetic peptide
SQSLVHSDGNTY

SEQ ID NO: 4601 - skipped

SEQ ID NO: 4602 - protein, 6 aa, synthetic construct
  REGION 1..6: note = Description of Artificial Sequence: Synthetic peptide
AKQFPL

SEQ ID NO: 4603 - protein, 10 aa, synthetic construct
  REGION 1..10: note = Description of Artificial Sequence: Synthetic peptide
GGTFSNYAIS

SEQ ID NO: 4604 - protein, 10 aa, synthetic construct
  REGION 1..10: note = Description of Artificial Sequence: Synthetic peptide
GIIPIFSAGT

SEQ ID NO: 4605 - protein, 14 aa, synthetic construct
  REGION 1..14: note = Description of Artificial Sequence: Synthetic peptide
NSGTYYDYYYGMDV

SEQ ID NO: 4606 - protein, 16 aa, synthetic construct
  REGION 1..16: note = Description of Artificial Sequence: Synthetic peptide
RSSQSLVHSDGNTYLS

SEQ ID NO: 4607 - protein, 7 aa, synthetic construct
  REGION 1..7: note = Description of Artificial Sequence: Synthetic peptide
KIFNRLS

SEQ ID NO: 4608 - protein, 9 aa, synthetic construct
  REGION 1..9: note = Description of Artificial Sequence: Synthetic peptide
MQAKQFPLT

SEQ ID NO: 4609 - protein, 6 aa, synthetic construct
  REGION 1..6: note = Description of Artificial Sequence: Synthetic peptide
SNYAIS

SEQ ID NO: 4610 - protein, 13 aa, synthetic construct
  REGION 1..13: note = Description of Artificial Sequence: Synthetic peptide
WMGGIIPIFSAGT

SEQ ID NO: 4611 - protein, 15 aa, synthetic construct
  REGION 1..15: note = Description of Artificial Sequence: Synthetic peptide
SSNSGTYYDYYYGMD

SEQ ID NO: 4612 - protein, 12 aa, synthetic construct
  REGION 1..12: note = Description of Artificial Sequence: Synthetic peptide
VHSDGNTYLSWL

SEQ ID NO: 4613 - protein, 10 aa, synthetic construct
  REGION 1..10: note = Description of Artificial Sequence: Synthetic peptide
LLIYKIFNRL

SEQ ID NO: 4614 - protein, 8 aa, synthetic construct
  REGION 1..8: note = Description of Artificial Sequence: Synthetic peptide
MQAKQFPL

SEQ ID NO: 4615 - protein, 8 aa, synthetic construct
  REGION 1..8: note = Description of Artificial Sequence: Synthetic peptide
GGTFSNYA

SEQ ID NO: 4616 - protein, 8 aa, synthetic construct
  REGION 1..8: note = Description of Artificial Sequence: Synthetic peptide
IIPIFSAG

SEQ ID NO: 4617 - protein, 16 aa, synthetic construct
  REGION 1..16: note = Description of Artificial Sequence: Synthetic peptide
SSNSGTYYDYYYGMDV

SEQ ID NO: 4618 - protein, 11 aa, synthetic construct
  REGION 1..11: note = Description of Artificial Sequence: Synthetic peptide
QSLVHSDGNTY

SEQ ID NO: 4619 - skipped

SEQ ID NO: 4620 - protein, 9 aa, synthetic construct
  REGION 1..9: note = Description of Artificial Sequence: Synthetic peptide
MQAKQFPLT

SEQ ID NO: 4621 - protein, 123 aa, synthetic construct
  REGION 1..123: note = Description of Artificial Sequence: Synthetic polypeptide
EVQLVQSGAEVKKPGSSVKVSCKASGGTFSNYAISWVRLAPGQGLEWMGGIIPIFSAGTYAQRFQGRVTITADKSTSTAYMELNSLRSEDTAVYYCSSNSGTYYDYYYGMDVWGQGTMVTVSS

SEQ ID NO: 4622 - protein, 112 aa, synthetic construct
  REGION 1..112: note = Description of Artificial Sequence: Synthetic polypeptide
DIVMTQSPLSSHVTLGQPASISCRSSQSLVHSDGNTYLSWLQQRPGQPPRLLIYKIFNRLSGVPDRFSGSGAGTDFTLKISRVEAEDVGVYYCMQAKQFPLTFGGGTKVEIK

SEQ ID NO: 4623 - protein, 453 aa, synthetic construct
  REGION 1..453: note = Description of Artificial Sequence: Synthetic polypeptide
EVQLVQSGAEVKKPGSSVKVSCKASGGTFSNYAISWVRLAPGQGLEWMGGIIPIFSAGTYAQRFQGRVTITADKSTSTAYMELNSLRSEDTAVYYCSSNSGTYYDYYYGMDVWGQGTMVTVSSASTKGPSVFPLAPSSKSTSGGTAALGCLVKDYFPEPVTVSWNSGALTSGVHTFPAVLQSSGLYSLSSVVTVPSSSLGTQTYICNVNHKPSNTKVDKKVEPKSCDKTHTCPPCPAPELLGGPSVFLFPPKPKDTLMISRTPEVTCVVVDVSHEDPEVKFNWYVDGVEVHNAKTKPREEQYNSTYRVVSVLTVLHQDWLNGKEYKCKVSNKALPAPIEKTISKAKGQPREPQVYTLPPSREEMTKNQVSLTCLVKGFYPSDIAVEWESNGQPENNYKTTPPVLDSDGSFFLYSKLTVDKSRWQQGNVFSCSVMHEALHNHYTQKSLSLSPGK

SEQ ID NO: 4624 - protein, 219 aa, synthetic construct
  REGION 1..219: note = Description of Artificial Sequence: Synthetic polypeptide
DIVMTQSPLSSHVTLGQPASISCRSSQSLVHSDGNTYLSWLQQRPGQPPRLLIYKIFNRLSGVPDRFSGSGAGTDFTLKISRVEAEDVGVYYCMQAKQFPLTFGGGTKVEIKRTVAAPSVFIFPPSDEQLKSGTASVVCLLNNFYPREAKVQWKVDNALQSGNSQESVTEQDSKDSTYSLSSTLTLSKADYEKHKVYACEVTHQGLSSPVTKSFNRGEC

SEQ ID NO: 4625 - protein, 5 aa, synthetic construct
  REGION 1..5: note = Description of Artificial Sequence: Synthetic peptide
SYAIS

SEQ ID NO: 4626 - protein, 17 aa, synthetic construct
  REGION 1..17: note = Description of Artificial Sequence: Synthetic peptide
GIIPFFGTADYAQKFQG

SEQ ID NO: 4627 - protein, 13 aa, synthetic construct
  REGION 1..13: note = Description of Artificial Sequence: Synthetic peptide
ATVTTDYYYGMDV

SEQ ID NO: 4628 - protein, 16 aa, synthetic construct
  REGION 1..16: note = Description of Artificial Sequence: Synthetic peptide
RSSQSLVHSDGNTYLS

SEQ ID NO: 4629 - protein, 7 aa, synthetic construct
  REGION 1..7: note = Description of Artificial Sequence: Synthetic peptide
EISNRFT

SEQ ID NO: 4630 - protein, 9 aa, synthetic construct
  REGION 1..9: note = Description of Artificial Sequence: Synthetic peptide
MQARQFPLT

SEQ ID NO: 4631 - protein, 7 aa, synthetic construct
  REGION 1..7: note = Description of Artificial Sequence: Synthetic peptide
GGTFSSY

SEQ ID NO: 4632 - protein, 6 aa, synthetic construct
  REGION 1..6: note = Description of Artificial Sequence: Synthetic peptide
IPFFGT

SEQ ID NO: 4633 - protein, 12 aa, synthetic construct
  REGION 1..12: note = Description of Artificial Sequence: Synthetic peptide
ATVTTDYYYGMD

SEQ ID NO: 4634 - protein, 12 aa, synthetic construct
  REGION 1..12: note = Description of Artificial Sequence: Synthetic peptide
SQSLVHSDGNTY

SEQ ID NO: 4635 - skipped

SEQ ID NO: 4636 - protein, 6 aa, synthetic construct
  REGION 1..6: note = Description of Artificial Sequence: Synthetic peptide
ARQFPL

SEQ ID NO: 4637 - protein, 10 aa, synthetic construct
  REGION 1..10: note = Description of Artificial Sequence: Synthetic peptide
GGTFSSYAIS

SEQ ID NO: 4638 - protein, 10 aa, synthetic construct
  REGION 1..10: note = Description of Artificial Sequence: Synthetic peptide
GIIPFFGTAD

SEQ ID NO: 4639 - protein, 13 aa, synthetic construct
  REGION 1..13: note = Description of Artificial Sequence: Synthetic peptide
ATVTTDYYYGMDV

SEQ ID NO: 4640 - protein, 16 aa, synthetic construct
  REGION 1..16: note = Description of Artificial Sequence: Synthetic peptide
RSSQSLVHSDGNTYLS

SEQ ID NO: 4641 - protein, 7 aa, synthetic construct
  REGION 1..7: note = Description of Artificial Sequence: Synthetic peptide
EISNRFT

SEQ ID NO: 4642 - protein, 9 aa, synthetic construct
  REGION 1..9: note = Description of Artificial Sequence: Synthetic peptide
MQARQFPLT

SEQ ID NO: 4643 - protein, 6 aa, synthetic construct
  REGION 1..6: note = Description of Artificial Sequence: Synthetic peptide
SSYAIS

SEQ ID NO: 4644 - protein, 13 aa, synthetic construct
  REGION 1..13: note = Description of Artificial Sequence: Synthetic peptide
WMGGIIPFFGTAD

SEQ ID NO: 4645 - protein, 14 aa, synthetic construct
  REGION 1..14: note = Description of Artificial Sequence: Synthetic peptide
ATATVTTDYYYGMD

SEQ ID NO: 4646 - protein, 12 aa, synthetic construct
  REGION 1..12: note = Description of Artificial Sequence: Synthetic peptide
VHSDGNTYLSWL

SEQ ID NO: 4647 - protein, 10 aa, synthetic construct
  REGION 1..10: note = Description of Artificial Sequence: Synthetic peptide
LLIYEISNRF

SEQ ID NO: 4648 - protein, 8 aa, synthetic construct
  REGION 1..8: note = Description of Artificial Sequence: Synthetic peptide
MQARQFPL

SEQ ID NO: 4649 - protein, 8 aa, synthetic construct
  REGION 1..8: note = Description of Artificial Sequence: Synthetic peptide
GGTFSSYA

SEQ ID NO: 4650 - protein, 8 aa, synthetic construct
  REGION 1..8: note = Description of Artificial Sequence: Synthetic peptide
IIPFFGTA

SEQ ID NO: 4651 - protein, 15 aa, synthetic construct
  REGION 1..15: note = Description of Artificial Sequence: Synthetic peptide
ATATVTTDYYYGMDV

SEQ ID NO: 4652 - protein, 11 aa, synthetic construct
  REGION 1..11: note = Description of Artificial Sequence: Synthetic peptide
QSLVHSDGNTY

SEQ ID NO: 4653 - skipped

SEQ ID NO: 4654 - protein, 9 aa, synthetic construct
  REGION 1..9: note = Description of Artificial Sequence: Synthetic peptide
MQARQFPLT

SEQ ID NO: 4655 - protein, 122 aa, synthetic construct
  REGION 1..122: note = Description of Artificial Sequence: Synthetic polypeptide
EVQLVESGAEVMKPGSSVKVSCKASGGTFSSYAISWVRQAPEQGLEWMGGIIPFFGTADYAQKFQGRVTITADKSTNTAYMELTSLRSEDTAVYYCATATVTTDYYYGMDVWGQGTMVTVSS

SEQ ID NO: 4656 - protein, 112 aa, synthetic construct
  REGION 1..112: note = Description of Artificial Sequence: Synthetic polypeptide
EIVMTQSPLFSPVTLGQPASISCRSSQSLVHSDGNTYLSWLQQRPGQPPRLLIYEISNRFTGVPDRFSGSGAGTDFTLKISRVEAEDVGVYYCMQARQFPLTFGGGTKVEIK

SEQ ID NO: 4657 - protein, 452 aa, synthetic construct
  REGION 1..452: note = Description of Artificial Sequence: Synthetic polypeptide
EVQLVESGAEVMKPGSSVKVSCKASGGTFSSYAISWVRQAPEQGLEWMGGIIPFFGTADYAQKFQGRVTITADKSTNTAYMELTSLRSEDTAVYYCATATVTTDYYYGMDVWGQGTMVTVSSASTKGPSVFPLAPSSKSTSGGTAALGCLVKDYFPEPVTVSWNSGALTSGVHTFPAVLQSSGLYSLSSVVTVPSSSLGTQTYICNVNHKPSNTKVDKKVEPKSCDKTHTCPPCPAPELLGGPSVFLFPPKPKDTLMISRTPEVTCVVVDVSHEDPEVKFNWYVDGVEVHNAKTKPREEQYNSTYRVVSVLTVLHQDWLNGKEYKCKVSNKALPAPIEKTISKAKGQPREPQVYTLPPSREEMTKNQVSLTCLVKGFYPSDIAVEWESNGQPENNYKTTPPVLDSDGSFFLYSKLTVDKSRWQQGNVFSCSVMHEALHNHYTQKSLSLSPGK

SEQ ID NO: 4658 - protein, 219 aa, synthetic construct
  REGION 1..219: note = Description of Artificial Sequence: Synthetic polypeptide
EIVMTQSPLFSPVTLGQPASISCRSSQSLVHSDGNTYLSWLQQRPGQPPRLLIYEISNRFTGVPDRFSGSGAGTDFTLKISRVEAEDVGVYYCMQARQFPLTFGGGTKVEIKRTVAAPSVFIFPPSDEQLKSGTASVVCLLNNFYPREAKVQWKVDNALQSGNSQESVTEQDSKDSTYSLSSTLTLSKADYEKHKVYACEVTHQGLSSPVTKSFNRGEC

SEQ ID NO: 4659 - protein, 493 aa, synthetic construct
  REGION 1..493: note = Description of Artificial Sequence: Synthetic polypeptide
MAWVWTLLFLMAAAQSIQAAGHLEQPQISSTKTLSKTARLECVVSGITISATSVYWYRERPGEVIQFLVSISYDGTVRKESGIPSGKFEVDRIPETSTSTLTIHNVEKQDIATYYCALWEAQQELGKKIKVFGPGTKLIITDKQLDADVSPKPTIFLPSIAETKLQKAGTYLCLLEKFFPDVIKIHWEEKKSNTILGSQEGNTMKTNDTYMKFSWLTVPEKSLDKEHRCIVRHENNKNGVDQEIIFPPIKTDVITMDPKDNEPKSCDKTHTCPPCPAPELLGGPSVFLFPPKPKDTLMISRTPEVTCVVVDVSHEDPEVKFNWYVDGVEVHNAKTKPREEQYNSTYRVVSVLTVLHQDWLNGKEYKCKVSNKALPAPIEKTISKAKGQPREPQVYVYPPSREEMTKNQVSLTCLVKGFYPSDIAVEWESNGQPENNYKTTPPVLDSDGSFALVSKLTVDKSRWQQGNVFSCSVMHEALHNHYTQKSLSLSPGK

SEQ ID NO: 4660 - protein, 480 aa, synthetic construct
  REGION 1..480: note = Description of Artificial Sequence: Synthetic polypeptide
MAWVWTLLFLMAAAQSIQAAIELVPEHQTVPVSIGVPATLRCSMKGEAIGNYYINWYRKTQGNTMTFIYREKDIYGPGFKDNFQGDIDIAKNLAVLKILAPSERDEGSYYCACDTLGMGGEYTDKLIFGKGTRVTVEPRSQPHTKPSVFVMKNGTNVACLVKEFYPKDIRINLVSSKKITEFDPAIVISPSGKYNAVKLGKYEDSNSVTCSVQHDNKTVHSTDFEVKTDSTDHVKPKETENTKQPSKSEPKSCDKTHTCPPCPAPELLGGPSVFLFPPKPKDTLMISRTPEVTCVVVDVSHEDPEVKFNWYVDGVEVHNAKTKPREEQYNSTYRVVSVLTVLHQDWLNGKEYKCKVSNKALPAPIEKTISKAKGQPREPQVYVLPPSREEMTKNQVSLLCLVKGFYPSDIAVEWESNGQPENNYLTWPPVLDSDGSFFLYSKLTVDKSRWQQGNVFSCSVMHEALHNHYTQKSLSLSPGK

What is claimed:

1. A method of directing a γδ T cell to a target cell, the method comprising contacting the γδ T cell with a multispecific antibody,
wherein the target cell expresses a second target, and wherein the contacting directs the γδ T cell to the target cell, and
wherein the multispecific antibody is a multispecific TRDV2 antibody that binds a Vδ2 (TRDV2) polypeptide, the multispecific antibody comprising a first binding domain that binds TRDV2, and a second binding domain that binds to the second target; wherein the first binding domain that binds to TRDV2 comprises:
(1) (i) a VH comprising a VH CDR1, a VH CDR2, and a VH CDR3 having an amino acid sequence of a VH CDR1, a VH CDR2, and a VH CDR3, respectively, of a VH having the amino acid sequence of SEQ ID NO:2037; and (ii) a VL comprising a VL CDR1, a VL CDR2, and a VL CDR3 having an amino acid sequence of a VL CDR1, a VL CDR2, and a VL CDR3, respectively, of a VL having the amino acid sequence of SEQ ID NO:2038;
(2) (i) a VH comprising a VH CDR1, a VH CDR2, and a VH CDR3 having an amino acid sequence of a VH CDR1, a VH CDR2, and a VH CDR3, respectively, of a VH having the amino acid sequence of SEQ ID NO:2071; and (ii) a VL comprising a VL CDR1, a VL CDR2, and a VL CDR3 having an amino acid sequence of a VL CDR1, a VL CDR2, and a VL CDR3, respectively, of a VL having the amino acid sequence of SEQ ID NO:2072;
(3) (i) a VH comprising a VH CDR1, a VH CDR2, and a VH CDR3 having an amino acid sequence of a VH CDR1, a VH CDR2, and a VH CDR3, respectively, of a VH having the amino acid sequence of SEQ ID NO:2105; and (ii) a VL comprising a VL CDR1, a VL CDR2, and a VL CDR3 having an amino acid sequence of a VL CDR1, a VL CDR2, and a VL CDR3, respectively, of a VL having the amino acid sequence of SEQ ID NO:2106;
(4) (i) a VH comprising a VH CDR1, a VH CDR2, and a VH CDR3 having an amino acid sequence of a VH CDR1, a VH CDR2, and a VH CDR3, respectively, of a VH having the amino acid sequence of SEQ ID NO:2139; and (ii) a VL comprising a VL CDR1, a VL CDR2, and a VL CDR3 having an amino acid sequence of a VL CDR1, a VL CDR2, and a VL CDR3, respectively, of a VL having amino acid sequence of SEQ ID NO:2140;
(5) (i) a VH comprising a VH CDR1, a VH CDR2, and a VH CDR3 having an amino acid sequence of a VH CDR1, a VH CDR2, and a VH CDR3, respectively, of a VH having the amino acid sequence of SEQ ID NO:2173; and (ii) a VL comprising a VL CDR1, a VL CDR2, and a VL CDR3 having an amino acid sequence of a VL CDR1, a VL CDR2, and a VL CDR3, respectively, of a VL having amino acid sequence of SEQ ID NO:2174;
(6) (i) a VH comprising a VH CDR1, a VH CDR2, and a VH CDR3 having an amino acid sequence of a VH CDR1, a VH CDR2, and a VH CDR3, respectively, of a VH having the amino acid sequence of SEQ ID NO:2207; and (ii) a VL comprising a VL CDR1, a VL CDR2, and a VL CDR3 having an amino acid sequence of a VL CDR1, a VL CDR2, and a VL CDR3, respectively, of a VL having the amino acid sequence of SEQ ID NO:2208;
(7) (i) a VH comprising a VH CDR1, a VH CDR2, and a VH CDR3 having an amino acid sequence of a VH CDR1, a VH CDR2, and a VH CDR3, respectively, of a VH having the amino acid sequence of SEQ ID NO:2241; and (ii) a VL comprising a VL CDR1, a VL CDR2, and a VL CDR3 having an amino acid sequence of a VL CDR1, a VL CDR2, and a VL CDR3, respectively, of a VL having the amino acid sequence of SEQ ID NO:2242;
(8) (i) a VH comprising a VH CDR1, a VH CDR2, and a VH CDR3 having an amino acid sequence of a VH CDR1, a VH CDR2, and a VH CDR3, respectively, of a VH having amino acid sequence of SEQ ID NO:2275; and (ii) a VL comprising a VL CDR1, a VL CDR2, and a VL CDR3 having an amino acid sequence of a VL CDR1, a VL CDR2, and a VL CDR3, respectively, of a VL having the amino acid sequence of SEQ ID NO:2276;
(9) (i) a VH comprising a VH CDR1, a VH CDR2, and a VH CDR3 having an amino acid sequence of a VH CDR1, a VH CDR2, and a VH CDR3, respectively, of a VH having the amino acid sequence of SEQ ID NO:2309; and (ii) a VL comprising a VL CDR1, a VL CDR2, and a VL CDR3 having an amino acid sequence of a VL CDR1, a VL CDR2, and a VL CDR3, respectively, of a VL having the amino acid sequence of SEQ ID NO:2310;
(10) (i) a VH comprising a VH CDR1, a VH CDR2, and a VH CDR3 having an amino acid sequence of a VH CDR1, a VH CDR2, and a VH CDR3, respectively, of a VH having the amino acid sequence of SEQ ID NO:2785; and (ii) a VL comprising a VL CDR1, a VL CDR2, and a VL CDR3 having an amino acid sequence of a VL CDR1, a VL CDR2, and a VL CDR3, respectively, of a VL having the amino acid sequence of SEQ ID NO:2786;
optionally wherein
(a) the multispecific antibody binds a TRDV2 antigen or a TRDV2 epitope;
(b) the multispecific antibody specifically binds to TRDV2;
(c) the VH CDR1, VH CDR2, VH CDR3, VL CDR1, VL CDR2 and VL CDR3 form a binding site for an antigen or an epitope of the TRDV2; or
(d) the TRDV2 is present on the surface of a T cell.

2. The method of claim 1, wherein the VH CDR1, VH CDR2, VH CDR3, VL CDR1, VL CDR2, and VL CDR3 amino acid sequences are according to
(a) the Kabat numbering system,
(b) the Chothia numbering system,
(c) the AbM numbering system,
(d) the Contact numbering system or
(e) the IMGT numbering system.

3. The method of claim 1, wherein the multispecific antibody:
(a) is a humanized multispecific antibody;
(b) is a multispecific IgG antibody; wherein optionally the IgG antibody is an IgG1, IgG2, IgG3, or IgG4 antibody;
(c) comprises a kappa light chain or a lambda light chain; or
(d) is a monoclonal multispecific antibody.

4. A method of inhibiting growth or proliferation of target cells, the method comprising contacting the target cells with a multispecific antibody, wherein the target cells express a second target on the cell surface, and wherein contacting the target cells with the multispecific antibody inhibits growth or proliferation of the target cells,
wherein the multispecific antibody is a multispecific TRDV2 antibody that binds a V62 (TRDV2) polypeptide, the multispecific antibody comprising a first binding domain that binds TRDV2, and a second binding domain that binds to the second target; wherein the first binding domain that binds to TRDV2 comprises:
(1) (i) a VH comprising a VH CDR1, a VH CDR2, and a VH CDR3 having an amino acid sequence of a VH CDR1, a VH CDR2, and a VH CDR3, respectively, of a VH having the amino acid sequence of SEQ ID NO:2037; and (ii) a VL comprising a VL CDR1, a VL CDR2, and a VL CDR3 having an amino acid sequence of a VL CDR1, a VL CDR2, and a VL CDR3, respectively, of a VL having the amino acid sequence of SEQ ID NO:2038;
(2) (i) a VH comprising a VH CDR1, a VH CDR2, and a VH CDR3 having an amino acid sequence of a VH CDR1, a VH CDR2, and a VH CDR3, respectively, of a VH having the amino acid sequence of SEQ ID NO:2071; and (ii) a VL comprising a VL CDR1, a VL CDR2, and a VL CDR3 having an amino acid sequence of a VL CDR1, a VL CDR2, and a VL CDR3, respectively, of a VL having the amino acid sequence of SEQ ID NO:2072;
(3) (i) a VH comprising a VH CDR1, a VH CDR2, and a VH CDR3 having an amino acid sequence of a VH CDR1, a VH CDR2, and a VH CDR3, respectively, of a VH having the amino acid sequence of SEQ ID NO:2105; and (ii) a VL comprising a VL CDR1, a VL CDR2, and a VL CDR3 having an amino acid sequence of a VL CDR1, a VL CDR2, and a VL CDR3, respectively, of a VL having the amino acid sequence of SEQ ID NO:2106;
(4) (i) a VH comprising a VH CDR1, a VH CDR2, and a VH CDR3 having an amino acid sequence of a VH CDR1, a VH CDR2, and a VH CDR3, respectively, of a VH having the amino acid sequence of SEQ ID NO:2139; and (ii) a VL comprising a VL CDR1, a VL CDR2, and a VL CDR3 having an amino acid sequence of a VL CDR1, a VL CDR2, and a VL CDR3, respectively, of a VL having amino acid sequence of SEQ ID NO:2140;
(5) (i) a VH comprising a VH CDR1, a VH CDR2, and a VH CDR3 having an amino acid sequence of a VH CDR1, a VH CDR2, and a VH CDR3, respectively, of a VH having the amino acid sequence of SEQ ID NO:2173; and (ii) a VL comprising a VL CDR1, a VL CDR2, and a VL CDR3 having an amino acid sequence of a VL CDR1, a VL CDR2, and a VL CDR3, respectively, of a VL having amino acid sequence of SEQ ID NO:2174;
(6) (i) a VH comprising a VH CDR1, a VH CDR2, and a VH CDR3 having an amino acid sequence of a VH CDR1, a VH CDR2, and a VH CDR3, respectively, of a VH having the amino acid sequence of SEQ ID NO:2207; and (ii) a VL comprising a VL CDR1, a VL CDR2, and a VL CDR3 having an amino acid sequence of a VL CDR1, a VL CDR2, and a VL CDR3, respectively, of a VL having the amino acid sequence of SEQ ID NO:2208;
(7) (i) a VH comprising a VH CDR1, a VH CDR2, and a VH CDR3 having an amino acid sequence of a VH CDR1, a VH CDR2, and a VH CDR3, respectively, of a VH having the amino acid sequence of SEQ ID NO:2241; and (ii) a VL comprising a VL CDR1, a VL CDR2, and a VL CDR3 having an amino acid sequence of a VL CDR1, a VL CDR2, and a VL CDR3, respectively, of a VL having the amino acid sequence of SEQ ID NO:2242;
(8) (i) a VH comprising a VH CDR1, a VH CDR2, and a VH CDR3 having an amino acid sequence of a VH CDR1, a VH CDR2, and a VH CDR3, respectively, of a VH having amino acid sequence of SEQ ID NO:2275; and (ii) a VL comprising a VL CDR1, a VL CDR2, and a VL CDR3 having an amino acid sequence of a VL CDR1, a VL CDR2, and a VL CDR3, respectively, of a VL having the amino acid sequence of SEQ ID NO:2276;
(9) (i) a VH comprising a VH CDR1, a VH CDR2, and a VH CDR3 having an amino acid sequence of a VH CDR1, a VH CDR2, and a VH CDR3, respectively, of a VH having the amino acid sequence of SEQ ID NO:2309; and (ii) a VL comprising a VL CDR1, a VL CDR2, and a VL CDR3 having an amino acid sequence of a VL CDR1, a VL CDR2, and a VL CDR3, respectively, of a VL having the amino acid sequence of SEQ ID NO:2310;
(10) (i) a VH comprising a VH CDR1, a VH CDR2, and a VH CDR3 having an amino acid sequence of a VH CDR1, a VH CDR2, and a VH CDR3, respectively, of a VH having the amino acid sequence of SEQ ID NO:2785; and (ii) a VL comprising a VL CDR1, a VL CDR2, and a VL CDR3 having an amino acid sequence of a VL CDR1, a VL CDR2, and a VL CDR3, respectively, of a VL having the amino acid sequence of SEQ ID NO:2786;
optionally wherein
(a) the multispecific antibody binds a TRDV2 antigen or a TRDV2 epitope;
(b) the multispecific antibody specifically binds to TRDV2;
(c) the VH CDR1, VH CDR2, VH CDR3, VL CDR1, VL CDR2 and VL CDR3 form a binding site for an antigen or an epitope of the TRDV2; or
(d) the TRDV2 is present on the surface of a T cell.

5. The method of claim 4, wherein the VH CDR1, VH CDR2, VH CDR3, VL CDR1, VL CDR2, and VL CDR3 amino acid sequences are according to
(a) the Kabat numbering system,
(b) the Chothia numbering system,
(c) the AbM numbering system,
(d) the Contact numbering system or
(e) the IMGT numbering system.

6. The method of claim 4, wherein the multispecific antibody:
(a) is a humanized multispecific antibody;
(b) is a multispecific IgG antibody; wherein optionally the IgG antibody is an IgG1, IgG2, IgG3, or IgG4 antibody;
(c) comprises a kappa light chain or a lambda light chain; or
(d) is a monoclonal multispecific antibody.

7. The method of claim 4, wherein the target cells are in the presence of a γδ T cell while in contact with the multispecific antibody.

8. A method for eliminating target cells in a subject, comprising administering an effective amount of a multispecific antibody to the subject, wherein the target cells express a second target optionally wherein the subject is a subject in need thereof,
wherein the multispecific antibody is a multispecific TRDV2 antibody that binds a V62 (TRDV2) polypeptide, the multispecific antibody comprising a first binding domain that binds TRDV2, and a second binding domain that binds to the second target; wherein the first binding domain that binds to TRDV2 comprises:
(1) (i) a VH comprising a VH CDR1, a VH CDR2, and a VH CDR3 having an amino acid sequence of a VH CDR1, a VH CDR2, and a VH CDR3, respectively, of a VH having the amino acid sequence of SEQ ID NO:2037; and (ii) a VL comprising a VL CDR1, a VL CDR2, and a VL CDR3 having an amino acid sequence of a VL CDR1, a VL CDR2, and a VL CDR3, respectively, of a VL having the amino acid sequence of SEQ ID NO:2038;
(2) (i) a VH comprising a VH CDR1, a VH CDR2, and a VH CDR3 having an amino acid sequence of a VH CDR1, a VH CDR2, and a VH CDR3, respectively, of a VH having the amino acid sequence of SEQ ID NO:2071; and (ii) a VL comprising a VL CDR1, a VL CDR2, and a VL CDR3 having an amino acid sequence of a VL CDR1, a VL CDR2, and a VL CDR3, respectively, of a VL having the amino acid sequence of SEQ ID NO:2072;
(3) (i) a VH comprising a VH CDR1, a VH CDR2, and a VH CDR3 having an amino acid sequence of a VH CDR1, a VH CDR2, and a VH CDR3, respectively, of a VH having the amino acid sequence of SEQ ID NO:2105; and (ii) a VL comprising a VL CDR1, a VL CDR2, and a VL CDR3 having an amino acid sequence of a VL CDR1, a VL CDR2, and a VL CDR3, respectively, of a VL having the amino acid sequence of SEQ ID NO:2106;
(4) (i) a VH comprising a VH CDR1, a VH CDR2, and a VH CDR3 having an amino acid sequence of a VH CDR1, a VH CDR2, and a VH CDR3, respectively, of a VH having the amino acid sequence of SEQ ID NO:2139; and (ii) a VL comprising a VL CDR1, a VL CDR2, and a VL CDR3 having an amino acid sequence of a VL CDR1, a VL CDR2, and a VL CDR3, respectively, of a VL having amino acid sequence of SEQ ID NO:2140;
(5) (i) a VH comprising a VH CDR1, a VH CDR2, and a VH CDR3 having an amino acid sequence of a VH CDR1, a VH CDR2, and a VH CDR3, respectively, of a VH having the amino acid sequence of SEQ ID NO:2173; and (ii) a VL comprising a VL CDR1, a VL CDR2, and a VL CDR3 having an amino acid sequence of a VL CDR1, a VL CDR2, and a VL CDR3, respectively, of a VL having amino acid sequence of SEQ ID NO:2174;
(6) (i) a VH comprising a VH CDR1, a VH CDR2, and a VH CDR3 having an amino acid sequence of a VH CDR1, a VH CDR2, and a VH CDR3, respectively, of a VH having the amino acid sequence of SEQ ID NO:2207; and (ii) a VL comprising a VL CDR1, a VL CDR2, and a VL CDR3 having an amino acid sequence of a VL CDR1, a VL CDR2, and a VL CDR3, respectively, of a VL having the amino acid sequence of SEQ ID NO:2208;
(7) (i) a VH comprising a VH CDR1, a VH CDR2, and a VH CDR3 having an amino acid sequence of a VH CDR1, a VH CDR2, and a VH CDR3, respectively, of a VH having the amino acid sequence of SEQ ID NO:2241; and (ii) a VL comprising a VL CDR1, a VL CDR2, and a VL CDR3 having an amino acid sequence of a VL CDR1, a VL CDR2, and a VL CDR3, respectively, of a VL having the amino acid sequence of SEQ ID NO:2242;
(8) (i) a VH comprising a VH CDR1, a VH CDR2, and a VH CDR3 having an amino acid sequence of a VH CDR1, a VH CDR2, and a VH CDR3, respectively, of a VH having amino acid sequence of SEQ ID NO:2275; and (ii) a VL comprising a VL CDR1, a VL CDR2, and a VL CDR3 having an amino acid sequence of a VL CDR1, a VL CDR2, and a VL CDR3, respectively, of a VL having the amino acid sequence of SEQ ID NO:2276;
(9) (i) a VH comprising a VH CDR1, a VH CDR2, and a VH CDR3 having an amino acid sequence of a VH CDR1, a VH CDR2, and a VH CDR3, respectively, of a VH having the amino acid sequence of SEQ ID NO:2309; and (ii) a VL comprising a VL CDR1, a VL CDR2, and a VL CDR3 having an amino acid sequence of a VL CDR1, a VL CDR2, and a VL CDR3, respectively, of a VL having the amino acid sequence of SEQ ID NO:2310;
(10) (i) a VH comprising a VH CDR1, a VH CDR2, and a VH CDR3 having an amino acid sequence of a VH CDR1, a VH CDR2, and a VH CDR3, respectively, of a VH having the amino acid sequence of SEQ ID NO:2785; and (ii) a VL comprising a VL CDR1, a VL CDR2, and a VL CDR3 having an amino acid sequence of a VL CDR1, a VL CDR2, and a VL CDR3, respectively, of a VL having the amino acid sequence of SEQ ID NO:2786;
optionally wherein
(a) the multispecific antibody binds a TRDV2 antigen or a TRDV2 epitope;
(b) the multispecific antibody specifically binds to TRDV2;
(c) the VH CDR1, VH CDR2, VH CDR3, VL CDR1, VL CDR2 and VL CDR3 form a binding site for an antigen or an epitope of the TRDV2; or
(d) the TRDV2 is present on the surface of a T cell.

9. The method of claim 8, wherein the VH CDR1, VH CDR2, VH CDR3, VL CDR1, VL CDR2, and VL CDR3 amino acid sequences are according to
(a) the Kabat numbering system,
(b) the Chothia numbering system,
(c) the AbM numbering system,
(d) the Contact numbering system or
(e) the IMGT numbering system.

10. The method of claim 8, wherein the multispecific antibody:
(a) is a humanized multispecific antibody;
(b) is a multispecific IgG antibody; wherein optionally the IgG antibody is an IgG1, IgG2, IgG3, or IgG4 antibody;
(c) comprises a kappa light chain or a lambda light chain; or
(d) is a monoclonal multispecific antibody.

11. A method for treating a disease caused all or in part by target cells in a subject, comprising administering an effective amount of a multispecific antibody to the subject, wherein the target cells express a second target; optionally wherein the subject is a subject in need thereof,
wherein the multispecific antibody is a multispecific TRDV2 antibody that binds a Vδ2 (TRDV2) polypeptide, the multispecific antibody comprising a first binding domain that binds TRDV2, and a second binding domain that binds to the second target; wherein the first binding domain that binds to TRDV2 comprises:
(1) (i) a VH comprising a VH CDR1, a VH CDR2, and a VH CDR3 having an amino acid sequence of a VH CDR1, a VH CDR2, and a VH CDR3, respectively, of a VH having the amino acid sequence of SEQ ID NO:2037; and (ii) a VL comprising a VL CDR1, a VL CDR2, and a VL CDR3 having an amino acid sequence of a VL CDR1, a VL CDR2, and a VL CDR3, respectively, of a VL having the amino acid sequence of SEQ ID NO:2038;
(2) (i) a VH comprising a VH CDR1, a VH CDR2, and a VH CDR3 having an amino acid sequence of a VH CDR1, a VH CDR2, and a VH CDR3, respectively, of a VH having the amino acid sequence of SEQ ID NO:2071; and (ii) a VL comprising a VL CDR1, a VL CDR2, and a VL CDR3 having an amino acid sequence of a VL CDR1, a VL CDR2, and a VL CDR3, respectively, of a VL having the amino acid sequence of SEQ ID NO:2072;
(3) (i) a VH comprising a VH CDR1, a VH CDR2, and a VH CDR3 having an amino acid sequence of a VH CDR1, a VH CDR2, and a VH CDR3, respectively, of a VH having the amino acid sequence of SEQ ID NO:2105; and (ii) a VL comprising a VL CDR1, a VL CDR2, and a VL CDR3 having an amino acid sequence of a VL CDR1, a VL CDR2, and a VL CDR3, respectively, of a VL having the amino acid sequence of SEQ ID NO:2106;
(4) (i) a VH comprising a VH CDR1, a VH CDR2, and a VH CDR3 having an amino acid sequence of a VH CDR1, a VH CDR2, and a VH CDR3, respectively, of a VH having the amino acid sequence of SEQ ID NO:2139; and (ii) a VL comprising a VL CDR1, a VL CDR2, and a VL CDR3 having an amino acid sequence of a VL CDR1, a VL CDR2, and a VL CDR3, respectively, of a VL having amino acid sequence of SEQ ID NO:2140;
(5) (i) a VH comprising a VH CDR1, a VH CDR2, and a VH CDR3 having an amino acid sequence of a VH CDR1, a VH CDR2, and a VH CDR3, respectively, of a VH having the amino acid sequence of SEQ ID NO:2173; and (ii) a VL comprising a VL CDR1, a VL CDR2, and a VL CDR3 having an amino acid sequence of a VL CDR1, a VL CDR2, and a VL CDR3, respectively, of a VL having amino acid sequence of SEQ ID NO:2174;
(6) (i) a VH comprising a VH CDR1, a VH CDR2, and a VH CDR3 having an amino acid sequence of a VH CDR1, a VH CDR2, and a VH CDR3, respectively, of a VH having the amino acid sequence of SEQ ID NO:2207; and (ii) a VL comprising a VL CDR1, a VL CDR2, and a VL CDR3 having an amino acid sequence of a VL CDR1, a VL CDR2, and a VL CDR3, respectively, of a VL having the amino acid sequence of SEQ ID NO:2208;
(7) (i) a VH comprising a VH CDR1, a VH CDR2, and a VH CDR3 having an amino acid sequence of a VH CDR1, a VH CDR2, and a VH CDR3, respectively, of a VH having the amino acid sequence of SEQ ID NO:2241; and (ii) a VL comprising a VL CDR1, a VL CDR2, and a VL CDR3 having an amino acid sequence of a VL CDR1, a VL CDR2, and a VL CDR3, respectively, of a VL having the amino acid sequence of SEQ ID NO:2242;
(8) (i) a VH comprising a VH CDR1, a VH CDR2, and a VH CDR3 having an amino acid sequence of a VH CDR1, a VH CDR2, and a VH CDR3, respectively, of a VH having amino acid sequence of SEQ ID NO:2275; and (ii) a VL comprising a VL CDR1, a VL CDR2, and a VL CDR3 having an amino acid sequence of a VL CDR1, a VL CDR2, and a VL CDR3, respectively, of a VL having the amino acid sequence of SEQ ID NO:2276;
(9) (i) a VH comprising a VH CDR1, a VH CDR2, and a VH CDR3 having an amino acid sequence of a VH CDR1, a VH CDR2, and a VH CDR3, respectively, of a VH having the amino acid sequence of SEQ ID NO:2309; and (ii) a VL comprising a VL CDR1, a VL CDR2, and a VL CDR3 having an amino acid sequence of a VL CDR1, a VL CDR2, and a VL CDR3, respectively, of a VL having the amino acid sequence of SEQ ID NO:2310;
(10) (i) a VH comprising a VH CDR1, a VH CDR2, and a VH CDR3 having an amino acid sequence of a VH CDR1, a VH CDR2, and a VH CDR3, respectively, of a VH having the amino acid sequence of SEQ ID NO:2785; and (ii) a VL comprising a VL CDR1, a VL CDR2, and a VL CDR3 having an amino acid sequence of a VL CDR1, a VL CDR2, and a VL CDR3, respectively, of a VL having the amino acid sequence of SEQ ID NO:2786;
optionally wherein
(a) the multispecific antibody binds a TRDV2 antigen or a TRDV2 epitope;
(b) the multispecific antibody specifically binds to TRDV2;
(c) the VH CDR1, VH CDR2, VH CDR3, VL CDR1, VL CDR2 and VL CDR3 form a binding site for an antigen or an epitope of the TRDV2; or
(d) the TRDV2 is present on the surface of a T cell.

12. The method of claim 11, wherein the VH CDR1, VH CDR2, VH CDR3, VL CDR1, VL CDR2, and VL CDR3 amino acid sequences are according to
(a) the Kabat numbering system,
(b) the Chothia numbering system,
(c) the AbM numbering system,
(d) the Contact numbering system or
(e) the IMGT numbering system.

13. The method of claim 11, wherein the multispecific antibody:
(a) is a humanized multispecific antibody;
(b) is a multispecific IgG antibody; wherein optionally the IgG antibody is an IgG1, IgG2, IgG3, or IgG4 antibody;
(c) comprises a kappa light chain or a lambda light chain; or
(d) is a monoclonal multispecific antibody.

14. A method of activating a T cell, wherein:
(a) the T cell expresses TRGV9, and the method comprises contacting the T cell with an antibody;
wherein optionally the contacting results in an increase in CD69, CD25, and/or Granzyme B expression, as compared to a control T cell expressing TRGV9;
(b) the T cell expresses TRDV2, and the method comprises contacting the T cell with the antibody;
wherein optionally the contacting results in an increase in CD69, CD25, and/or Granzyme B expression, as compared to a control T cell expressing TRDV2; or
(c) the T cell expresses TRGDC, and the method comprises contacting the T cell with the antibody;
wherein optionally the contacting results in an increase in CD69, CD25, and/or Granzyme B expression, as compared to a control T cell expressing TRGDC,
wherein the antibody binds a V62 (TRDV2) polypeptide, the antibody comprising:
(1) (i) a VH comprising a VH CDR1, a VH CDR2, and a VH CDR3 having an amino acid sequence of a VH CDR1, a VH CDR2, and a VH CDR3, respectively, of a VH having the amino acid sequence of SEQ ID NO:2037; and (ii) a VL comprising a VL CDR1, a VL CDR2, and a VL CDR3 having an amino acid sequence of a VL CDR1, a VL CDR2, and a VL CDR3, respectively, of a VL having the amino acid sequence of SEQ ID NO:2038;
(2) (i) a VH comprising a VH CDR1, a VH CDR2, and a VH CDR3 having an amino acid sequence of a VH CDR1, a VH CDR2, and a VH CDR3, respectively, of a VH having the amino acid sequence of SEQ ID NO:2071; and (ii) a VL comprising a VL CDR1, a VL CDR2, and a VL CDR3 having an amino acid sequence of a VL CDR1, a VL CDR2, and a VL CDR3, respectively, of a VL having the amino acid sequence of SEQ ID NO:2072;
(3) (i) a VH comprising a VH CDR1, a VH CDR2, and a VH CDR3 having an amino acid sequence of a VH CDR1, a VH CDR2, and a VH CDR3, respectively, of a VH having the amino acid sequence of SEQ ID NO:2105; and (ii) a VL comprising a VL CDR1, a VL CDR2, and a VL CDR3 having an amino acid sequence of a VL CDR1, a VL CDR2, and a VL CDR3, respectively, of a VL having the amino acid sequence of SEQ ID NO:2106;
(4) (i) a VH comprising a VH CDR1, a VH CDR2, and a VH CDR3 having an amino acid sequence of a VH CDR1, a VH CDR2, and a VH CDR3, respectively, of a VH having the amino acid sequence of SEQ ID NO:2139; and (ii) a VL comprising a VL CDR1, a VL CDR2, and a VL CDR3 having an amino acid sequence of a VL CDR1, a VL CDR2, and a VL CDR3, respectively, of a VL having amino acid sequence of SEQ ID NO:2140;
(5) (i) a VH comprising a VH CDR1, a VH CDR2, and a VH CDR3 having an amino acid sequence of a VH CDR1, a VH CDR2, and a VH CDR3, respectively, of a VH having the amino acid sequence of SEQ ID NO:2173; and (ii) a VL comprising a VL CDR1, a VL CDR2, and a VL CDR3 having an amino acid sequence of a VL CDR1, a VL CDR2, and a VL CDR3, respectively, of a VL having amino acid sequence of SEQ ID NO:2174;
(6) (i) a VH comprising a VH CDR1, a VH CDR2, and a VH CDR3 having an amino acid sequence of a VH CDR1, a VH CDR2, and a VH CDR3, respectively, of a VH having the amino acid sequence of SEQ ID NO:2207; and (ii) a VL comprising a VL CDR1, a VL CDR2, and a VL CDR3 having an amino acid sequence of a VL CDR1, a VL CDR2, and a VL CDR3, respectively, of a VL having the amino acid sequence of SEQ ID NO:2208;
(7) (i) a VH comprising a VH CDR1, a VH CDR2, and a VH CDR3 having an amino acid sequence of a VH CDR1, a VH CDR2, and a VH CDR3, respectively, of a VH having the amino acid sequence of SEQ ID NO:2241; and (ii) a VL comprising a VL CDR1, a VL CDR2, and a VL CDR3 having an amino acid sequence of a VL CDR1, a VL CDR2, and a VL CDR3, respectively, of a VL having the amino acid sequence of SEQ ID NO:2242;
(8) (i) a VH comprising a VH CDR1, a VH CDR2, and a VH CDR3 having an amino acid sequence of a VH CDR1, a VH CDR2, and a VH CDR3, respectively, of a VH having amino acid sequence of SEQ ID NO:2275; and (ii) a VL comprising a VL CDR1, a VL CDR2, and a VL CDR3 having an amino acid sequence of a VL CDR1, a VL CDR2, and a VL CDR3, respectively, of a VL having the amino acid sequence of SEQ ID NO:2276;
(9) (i) a VH comprising a VH CDR1, a VH CDR2, and a VH CDR3 having an amino acid sequence of a VH CDR1, a VH CDR2, and a VH CDR3, respectively, of a VH having the amino acid sequence of SEQ ID NO:2309; and (ii) a VL comprising a VL CDR1, a VL CDR2, and a VL CDR3 having an amino acid sequence of a VL CDR1, a VL CDR2, and a VL CDR3, respectively, of a VL having the amino acid sequence of SEQ ID NO:2310;
(10) (i) a VH comprising a VH CDR1, a VH CDR2, and a VH CDR3 having an amino acid sequence of a VH CDR1, a VH CDR2, and a VH CDR3, respectively, of a VH having the amino acid sequence of SEQ ID NO:2785; and (ii) a VL comprising a VL CDR1, a VL CDR2, and a VL CDR3 having an amino acid sequence of a VL CDR1, a VL CDR2, and a VL CDR3, respectively, of a VL having the amino acid sequence of SEQ ID NO:2786;
optionally wherein
(a) the antibody binds a TRDV2 antigen or a TRDV2 epitope;
(b) the antibody specifically binds to TRDV2;
(c) the VH CDR1, VH CDR2, VH CDR3, VL CDR1, VL CDR2 and VL CDR3 form a binding site for an antigen or an epitope of the TRDV2; or
(d) the TRDV2 is present on the surface of a T cell.

15. The method of claim 14, wherein the VH CDR1, VH CDR2, VH CDR3, VL CDR1, VL CDR2, and VL CDR3 amino acid sequences are according to
(a) the Kabat numbering system,
(b) the Chothia numbering system,
(c) the AbM numbering system,
(d) the Contact numbering system or
(e) the IMGT numbering system.

16. The method of claim 14, wherein the antibody:
(a) is a humanized antibody;
(b) is an IgG antibody; wherein optionally the IgG antibody is an IgG1, IgG2, IgG3, or IgG4 antibody;
(c) comprises a kappa light chain or a lambda light chain; or
(d) is a monoclonal antibody.

17. The antibody of claim 14, wherein the antibody is multivalent; wherein optionally
(a) the antibody is capable of binding at least three antigens;
(b) the antibody is capable of binding at least four antigens; or
(c) the antibody is capable of binding at least five antigens.

18. The antibody of claim 14, wherein the antibody is a multispecific antibody, wherein optionally the multispecific antibody is a bispecific antibody, a trispecific antibody, or a quadraspecific antibody.
